(19) United States
(12) Patent Application Publication
(10) Pub. No.: US 2025/0146076 A1
(43) Pub. Date: May 8, 2025

(54) ALK GENE FUSIONS AND USES THEREOF

(71) Applicant: FOUNDATION MEDICINE, INC., Cambridge, MA (US)

(72) Inventors: Xin LIU, Boston, MA (US); Erica GORNSTEIN, Melrose, MA (US); Rachel ERBACH, Arlington, MA (US); Mark ROSENZWEIG, Norfolk, MA (US)

(73) Assignee: Foundation Medicine, Inc., Boston, MA (US)

(21) Appl. No.: 18/726,094

(22) PCT Filed: Jan. 13, 2023
(86) PCT No.: PCT/US2023/060663

§ 371 Date: Jul. 1, 2024

Related U.S. Application Data
(60) Provisional application No. 63/299,688, filed on Jan. 14, 2022.

(51) Int. Cl. C12Q 1/6886

(52) U.S. Cl. CPC C12Q 1/6886; C12Q 2600/156

(57) ABSTRACT

Provided herein are anaplastic lymphoma kinase (ALK) fusion nucleic acid molecules and polypeptides, methods related to detecting ALK fusion nucleic acid molecules and polypeptides in cancer, as well as methods of treatment and uses related thereto. Detection of an ALK fusion nucleic acid molecule or polypeptide can be used to identify individuals that may benefit from treatment with an anti-cancer therapy.

### CROSS-REFERENCE TO RELATED APPLICATIONS

[0001] This application claims the benefit of U.S. Provisional Application No. 63/299,688, filed Jan. 14, 2022, which is hereby incorporated by reference in its entirety.

### REFERENCE TO AN ELECTRONIC SEQUENCE LISTING

[0002] The contents of the electronic sequence listing (197102007340SEQLIST.xml; Size: 708,628 bytes; and Date of Creation: Jan. 12, 2023) are herein incorporated by reference in their entirety.

### TECHNICAL FIELD

[0003] Provided herein are anaplastic lymphoma kinase (ALK) fusion nucleic acid molecules and polypeptides, methods related to detecting such ALK fusion nucleic acid molecules and polypeptides, as well as methods of diagnosis/treatment and uses related thereto.

### BACKGROUND

[0004] Kinases activated by gene fusions are established oncogenic drivers and therapeutic targets, and have been associated with both hematopoietic malignancies and solid tumors. Kinase fusions have also been observed in patients following initial treatment with targeted therapies, suggesting that kinase fusions may be an acquired resistance mechanism, and that patients with such fusions could benefit from strategies that target the acquired kinase fusion. See, e.g, Xu et al., Cancer Manag Res (2019) 11:6343-51; Piotrowska et al., Cancer Discov (2018) 8(12):1529-39; Schrock et al., J Thorac Oncol (2018) 13(9):1312-23; and Schrock et al., J Thorac Oncol 2019; 14(2):255-64).

[0005] The anaplastic lymphoma kinase (ALK) gene encodes a receptor tyrosine kinase. ALK is a member of the insulin receptor superfamily. ALK activation induces downstream pathways associated with cell survival, angiogenesis, and cell proliferation (Grande et al., Molecular cancer therapeutics, vol. 10, 4 (2011): 569-79). ALK is a known oncogene that has been associated with cancerous phenotypes, including inflammatory myofibroblastic tumors, neuroblastoma, lung cancer, non-Hodgkin's lymphoma, and anaplastic large cell lymphoma, among others. Chromosomal rearrangements involving the ALK gene have been found in certain cancers, and have been characterized as oncogenic (see, e.g., Hallberg et al., Annals of oncology, vol. 27 Suppl 3 (2016): iii4-iii15; and Ignatius et al., JTO clinical and research reports, vol. 1, 1 100015, 2020). ALK gene fusions have also been associated with sensitivity of cancer to ALK inhibitors, such as crizotinib, ceritinib, alectinib, or entrectinib (see, e.g., Ali et al., USCAP Abstract 1868 2015; Mansfield et al., Annals of oncology, vol. 27, 11 (2016): 2111-2117; Yakirevich et al., Clinical cancer research, vol. 22, 15 (2016): 3831-40; Subbiah et al., Journal of hematology & oncology, vol. 8 66, 2015; Amatu et al., British journal of cancer vol. 113, 12 (2015): 1730-4; Lee et al., Oncotarget vol. 6, 27 (2015): 24320-32; Shan et al., Journal of thoracic oncology, vol. 10, 6 (2015): e37-9; Ali et al., The oncologist, vol. 21, 6 (2016): 762-70; and Ou et al., Journal of thoracic oncology, vol. 9, 12 (2014): 1821-5).

[0006] Thus, there is a need in the art for characterizing the cancer landscape of ALK kinase fusions, and for developing methods, compositions, and assays for evaluating and treating patients with such fusions.

[0007] All references cited herein, including patents, patent applications and publications, are hereby incorporated by reference in their entirety. To the extent that any reference incorporated by reference conflicts with the instant disclosure, the instant disclosure shall control.

### SUMMARY OF THE INVENTION

[0008] In one aspect, provided herein is a method of identifying an individual having a cancer who may benefit from a treatment comprising an anaplastic lymphoma kinase (ALK)-targeted therapy, the method comprising detecting in a sample from the individual: (a) an ALK fusion nucleic acid molecule comprising a fusion between an ALK gene, or a portion thereof, and a gene listed in Table 1, or a portion thereof, or (b) an ALK fusion polypeptide encoded by the ALK fusion nucleic acid molecule, wherein detection of the ALK fusion nucleic acid molecule or polypeptide in the sample identifies the individual as one who may benefit from the treatment comprising the ALK-targeted therapy.

[0009] In another aspect, provided herein is a method of selecting a therapy for an individual having a cancer, the method comprising detecting in a sample from the individual: (a) an ALK fusion nucleic acid molecule comprising a fusion between an ALK gene, or a portion thereof, and a gene listed in Table 1, or a portion thereof, or (b) an ALK fusion polypeptide encoded by the ALK fusion nucleic acid molecule, wherein detection of the ALK fusion nucleic acid molecule or polypeptide in the sample identifies the individual as one who may benefit from a treatment comprising an ALK-targeted therapy.

[0010] In another aspect, provided herein is a method of identifying one or more treatment options for an individual having a cancer, the method comprising: (a) detecting in a sample from the individual: (i) an ALK fusion nucleic acid molecule comprising a fusion between an ALK gene, or a portion thereof, and a gene listed in Table 1, or a portion thereof, or (ii) an ALK fusion polypeptide encoded by the ALK fusion nucleic acid molecule; and (b) generating a report comprising one or more treatment options identified for the individual based at least in part on detection of the ALK fusion nucleic acid molecule or polypeptide in the sample, wherein the one or more treatment options comprise an ALK-targeted therapy.

[0011] In another aspect, provided herein is a method of identifying one or more treatment options for an individual having a cancer, the method comprising: (a) acquiring knowledge of: (i) an ALK fusion nucleic acid molecule comprising a fusion between an ALK gene, or a portion thereof, and a gene listed in Table 1, or a portion thereof, or (ii) an ALK fusion polypeptide encoded by the ALK fusion nucleic acid molecule, in a sample from the individual; and (b) generating a report comprising one or more treatment options identified for the individual based at least in part on said knowledge, wherein the one or more treatment options comprise an ALK-targeted therapy.

[0012] In another aspect, provided herein is a method of selecting a treatment for an individual having cancer, comprising acquiring knowledge of: (a) an ALK fusion nucleic acid molecule comprising a fusion between an ALK gene, or a portion thereof, and a gene listed in Table 1, or a portion thereof, or (b) an ALK fusion polypeptide encoded by the ALK fusion nucleic acid molecule, in a sample from an individual having a cancer, wherein responsive to the acquisition of said knowledge: (i) the individual is classified as a candidate to receive a treatment comprising an ALK-targeted therapy; and/or (ii) the individual is identified as likely to respond to a treatment that comprises an ALK-targeted therapy.

[0013] In another aspect, provided herein is a method of predicting survival of an individual having a cancer, comprising acquiring knowledge of: (a) an ALK fusion nucleic acid molecule comprising a fusion between an ALK gene, or a portion thereof, and a gene listed in Table 1, or a portion thereof, or (b) an ALK fusion polypeptide encoded by the ALK fusion nucleic acid molecule, in a sample from the individual, wherein responsive to the acquisition of said knowledge, the individual is predicted to have longer survival when treated with a treatment comprising an ALK-targeted therapy, as compared to survival of an individual whose cancer does not comprise an ALK fusion nucleic acid molecule or polypeptide.

[0014] In another aspect, provided herein is a method of predicting survival of an individual having a cancer treated with a treatment comprising an ALK-targeted therapy, the method comprising acquiring knowledge of: (a) an ALK fusion nucleic acid molecule comprising a fusion between an ALK gene, or a portion thereof, and a gene listed in Table 1, or a portion thereof, or (b) an ALK fusion polypeptide encoded by the ALK fusion nucleic acid molecule, in a sample from the individual, wherein responsive to the acquisition of said knowledge, the individual is predicted to have longer survival when treated with a treatment comprising an ALK-targeted therapy, as compared to an individual whose cancer does not exhibit an ALK fusion nucleic acid molecule or polypeptide.

[0015] In another aspect, provided herein is a method of treating or delaying progression of cancer, comprising: (a) acquiring knowledge of: (i) an ALK fusion nucleic acid molecule comprising a fusion between an ALK gene, or a portion thereof, and a gene listed in Table 1, or a portion thereof, or (ii) an ALK fusion polypeptide encoded by the ALK fusion nucleic acid molecule, in a sample from an individual having a cancer; and (b) responsive to said knowledge, administering to the individual an effective amount of a treatment that comprises an ALK-targeted therapy.

[0016] In another aspect, provided herein is a method of treating or delaying progression of cancer, comprising administering to an individual having cancer an effective amount of a treatment that comprises an ALK-targeted therapy, wherein the ALK-targeted therapy is administered responsive to acquiring knowledge of: (a) an ALK fusion nucleic acid molecule comprising a fusion between an ALK gene, or a portion thereof, and a gene listed in Table 1, or a portion thereof, or (b) an ALK fusion polypeptide encoded by the ALK fusion nucleic acid molecule, in a sample from the individual.

[0017] In another aspect, provided herein is a method of monitoring, evaluating or screening an individual having a cancer, comprising acquiring knowledge of: (a) an ALK fusion nucleic acid molecule comprising a fusion between an ALK gene, or a portion thereof, and a gene listed in Table 1, or a portion thereof, or (b) an ALK fusion polypeptide encoded by the ALK fusion nucleic acid molecule, in a sample from the individual, wherein responsive to the acquisition of said knowledge, the individual is predicted to have increased risk of cancer recurrence, aggressive cancer, anti-cancer therapy resistance, increased ALK expression, clinical benefit from an ALK-targeted therapy, or poor prognosis, as compared to an individual whose cancer does not comprise an ALK fusion nucleic acid molecule or polypeptide. In some embodiments, responsive to the acquisition of said knowledge, the individual is predicted to have resistance to a non-ALK-targeted anti-cancer therapy.

[0018] In another aspect, provided herein is a method of assessing an ALK fusion nucleic acid molecule or polypeptide in a cancer in an individual, the method comprising: (a) detecting in a sample from the individual: (i) an ALK fusion nucleic acid molecule comprising a fusion between an ALK gene, or a portion thereof, and a gene listed in Table 1, or a portion thereof, or (ii) an ALK fusion polypeptide encoded by the ALK fusion nucleic acid molecule; and (b) providing an assessment of the ALK fusion nucleic acid molecule or polypeptide.

[0019] In another aspect, provided herein is a method of detecting an ALK fusion nucleic acid molecule or polypeptide, the method comprising detecting in a sample from an individual having a cancer: (a) an ALK fusion nucleic acid molecule comprising a fusion between an ALK gene, or a portion thereof, and a gene listed in Table 1, or a portion thereof, or (b) an ALK fusion polypeptide encoded by the ALK fusion nucleic acid molecule.

[0020] In another aspect, provided herein is a method of detecting the presence or absence of a cancer in an individual, the method comprising: (a) detecting the presence or absence of a cancer in a sample from the individual; and (b) detecting in a sample from the individual the presence or absence of: (i) an ALK fusion nucleic acid molecule comprising a fusion between an ALK gene, or a portion thereof, and a gene listed in Table 1, or a portion thereof, or (ii) an ALK fusion polypeptide encoded by the ALK fusion nucleic acid molecule. In some embodiments, the method comprises detecting the presence of the cancer in a sample from the individual. In some embodiments, the method comprises detecting the presence of the ALK fusion nucleic acid molecule, or the ALK fusion polypeptide encoded by the ALK fusion nucleic acid molecule, in a sample from the individual.

[0021] In another aspect, provided herein is a method for monitoring progression or recurrence of a cancer in an individual, the method comprising: (a) detecting, in a first sample obtained from the individual at a first time point, the presence or absence of: (i) an ALK fusion nucleic acid molecule comprising a fusion between an ALK gene, or a portion thereof, and a gene listed in Table 1, or a portion thereof, or (ii) an ALK fusion polypeptide encoded by the ALK fusion nucleic acid molecule; (b) detecting, in a second sample obtained from the individual at a second time point after the first time point, the presence or absence of: (i) an ALK fusion nucleic acid molecule comprising a fusion between an ALK gene, or a portion thereof, and a gene listed in Table 1, or a portion thereof, or (ii) an ALK fusion polypeptide encoded by the ALK fusion nucleic acid molecule; and (c) providing an assessment of cancer progression or cancer recurrence in the individual based, at least in part, on the presence or absence of the ALK fusion nucleic acid molecule or the ALK fusion polypeptide in the first sample and/or in the second sample. In some embodiments, the presence of the ALK fusion nucleic acid molecule or the ALK fusion polypeptide in the first sample and/or in the second sample identifies the individual as having increased risk of cancer progression or cancer recurrence. In some embodiments, the method further comprises selecting a treatment, administering a treatment, adjusting a treatment, adjusting the dose of a treatment, or applying a treatment to the individual based, at least in part, on detecting the presence of the ALK fusion nucleic acid molecule or the ALK fusion polypeptide in the first sample and/or in the second sample, wherein the treatment comprises an ALK-targeted therapy.

[0022] In another aspect, provided herein is a method of detecting an ALK fusion nucleic acid molecule, the method comprising: (a) providing a plurality of nucleic acid molecules obtained from a sample from an individual having a cancer, wherein the plurality of nucleic acid molecules comprises nucleic acid molecules corresponding to an ALK fusion nucleic acid molecule comprising a fusion between an ALK gene, or a portion thereof, and a gene listed in Table 1, or a portion thereof; (b) optionally, ligating one or more adapters onto one or more nucleic acid molecules from the plurality of nucleic acid molecules; (c) optionally, amplifying the one or more ligated nucleic acid molecules from the plurality of nucleic acid molecules; (d) optionally, capturing amplified nucleic acid molecules from the amplified nucleic acid molecules; (e) sequencing, by a sequencer, the captured nucleic acid molecules to obtain a plurality of sequence reads that represent the captured nucleic acid molecules, wherein one or more of the plurality of sequence reads correspond to the ALK fusion nucleic acid molecule; (f) analyzing the plurality of sequence reads; and (g) based on the analysis, detecting the presence or absence of the ALK fusion nucleic acid molecule in the sample. In some embodiments, the method further comprises receiving, at one or more processors, sequence read data for the plurality of sequence reads. In some embodiments, the analyzing the plurality of sequence reads comprises identifying, using the one or more processors, the presence or absence of sequence reads corresponding to the ALK fusion nucleic acid molecule. In some embodiments, the amplified nucleic acid molecules are captured by hybridization with one or more bait molecules. In another aspect, provided herein is a method of detecting an ALK fusion nucleic acid molecule, the method comprising: (a) providing a sample from an individual having a cancer, wherein the sample comprises a plurality of nucleic acid molecules; (b) preparing a nucleic acid sequencing library from the plurality of nucleic acid molecules in the sample; (c) amplifying said library; (d) selectively enriching for one or more nucleic acid molecules comprising nucleotide sequences corresponding to an ALK fusion nucleic acid molecule in said library to produce an enriched sample, wherein the ALK fusion nucleic acid molecule comprises a fusion between an ALK gene, or a portion thereof, and a gene listed in Table 1, or a portion thereof; (e) sequencing the enriched sample, thereby producing a plurality of sequence reads; (f) analyzing the plurality of sequence reads for the presence of the ALK fusion nucleic acid molecule; and (g) detecting, based on the analyzing step, the presence or absence of the ALK fusion nucleic acid molecule in the sample from the individual. In some embodiments, the plurality of nucleic acid molecules comprises a mixture of cancer nucleic acid molecules and non-cancer nucleic acid molecules. In some embodiments, the cancer nucleic acid molecules are derived from a tumor portion of a heterogeneous tissue biopsy sample, and the non-cancer nucleic acid molecules are derived from a normal portion of the heterogeneous tissue biopsy sample. In some embodiments, the sample comprises a liquid biopsy sample, and wherein the cancer nucleic acid molecules are derived from a circulating tumor DNA (ctDNA) fraction of the liquid biopsy sample, and the non-cancer nucleic acid molecules are derived from a non-tumor fraction of the liquid biopsy sample. In some embodiments, the one or more adapters comprise amplification primers, flow cell adapter sequences, substrate adapter sequences, sample index sequences, or unique molecular identifier (UMI) sequences. In some embodiments, the selectively enriching comprises: (a) combining one or more bait molecules with the library, thereby hybridizing the one or more bait molecules to one or more nucleic acid molecules comprising nucleotide sequences corresponding to the ALK fusion nucleic acid molecule and producing nucleic acid hybrids; and (b) isolating the nucleic acid hybrids to produce the enriched sample. In some embodiments, the captured nucleic acid molecules are captured from the amplified nucleic acid molecules by hybridization to one or more bait molecules. In some embodiments, the amplifying comprises performing a polymerase chain reaction (PCR) amplification technique, a non-PCR amplification technique, or an isothermal amplification technique. In some embodiments, the sequencing comprises use of a massively parallel sequencing (MPS) technique, whole genome sequencing (WGS), whole exome sequencing, targeted sequencing, direct sequencing, or a Sanger sequencing technique. In some embodiments, the sequencing comprises a massively parallel sequencing technique, and the massively parallel sequencing technique comprises next generation sequencing (NGS). In some embodiments, the sequencer comprises a next generation sequencer. In some embodiments, the method further comprises generating a molecular profile for the individual, based, at least in part, on detecting the presence or absence of the ALK fusion nucleic acid molecule. In some embodiments, the molecular profile for the individual further comprises results from a comprehensive genomic profiling (CGP) test, a gene expression profiling test, a cancer hotspot panel test, a DNA methylation test, a DNA fragmentation test, an RNA fragmentation test, or any combination thereof. In some embodiments, the molecular profile for the individual further comprises results from a nucleic acid sequencing-based test. In some embodiments, the method further comprises selecting a treatment, administering a treatment, or applying a treatment to the individual based on the generated molecular profile, wherein the treatment comprises an ALK-targeted therapy. In some embodiments, the method further comprises generating a report indicating the presence or absence of the ALK fusion nucleic acid molecule in the sample. In some embodiments, the method further comprises generating, by the one or more processors, a report indicating the presence or absence of the ALK fusion nucleic acid molecule in the sample. In some embodiments, the method further comprises transmitting the report to the individual, a caregiver, a healthcare provider, a physician, an oncologist, an electronic medical record system, a hospital, a clinic, a third-party payer, an insurance company, or a government office. In some embodiments, the report is transmitted via a computer network or a peer-to-peer connection.

[0023] In another aspect, provided herein is a method of identifying a candidate treatment for a cancer in an individual in need thereof, comprising performing DNA sequencing on a sample obtained from the individual to determine a sequencing mutation profile on a group of genes comprising one or more of ALK, one or more genes listed in Table 1, or any combination thereof, wherein the sequencing mutation profile identifies the presence or absence of an ALK fusion nucleic acid molecule, wherein the ALK fusion nucleic acid molecule comprises a fusion between an ALK gene, or a portion thereof, and a gene listed in Table 1, or a portion thereof. In some embodiments, the candidate treatment comprises an ALK-targeted therapy. In some embodiments, the presence of the ALK fusion nucleic acid molecule in the sample identifies the individual as one who may benefit from a treatment comprising an ALK-targeted therapy. In some embodiments, the presence of the ALK fusion nucleic acid molecule in the sample predicts the individual to have longer survival when treated with a treatment comprising an ALK-targeted therapy, as compared to survival of an individual whose cancer does not comprise an ALK fusion nucleic acid molecule. In some embodiments, the sequencing comprises use of a massively parallel sequencing (MPS) technique, whole genome sequencing (WGS), whole exome sequencing, targeted sequencing, direct sequencing, or a Sanger sequencing technique. In some embodiments, the sequencing comprises a massively parallel sequencing technique, and the massively parallel sequencing technique comprises next generation sequencing (NGS). In some embodiments, the sequencing mutation profile identifies the presence or absence of a fragment of the ALK fusion nucleic acid molecule comprising a breakpoint or fusion junction.

[0024] In another aspect, provided herein is a method of treating or delaying progression of cancer, comprising: (a) detecting in a sample from an individual having a cancer: (i) an ALK fusion nucleic acid molecule comprising a fusion between an ALK gene, or a portion thereof, and a gene listed in Table 1, or a portion thereof, or (ii) an ALK fusion polypeptide encoded by the ALK fusion nucleic acid molecule; and (b) administering to the individual an effective amount of a treatment that comprises an ALK-targeted therapy.

[0025] In some embodiments, which may be combined with any of the preceding aspects or embodiments, the ALK fusion nucleic acid molecule is an ALK fusion nucleic acid molecule listed in Table 2, and wherein the order of the genes in the fusion in the 5′ to 3′ direction is as listed in Table 2. In some embodiments, which may be combined with any of the preceding aspects or embodiments, the ALK fusion nucleic acid molecule is an ALK fusion nucleic acid molecule listed in Table 3, and wherein the ALK fusion nucleic acid molecule comprises or results from a corresponding 5′ breakpoint and/or 3′ breakpoint within the exons or introns as listed in Table 3. In some embodiments, which may be combined with any of the preceding aspects or embodiments, the ALK fusion nucleic acid molecule is an ALK fusion nucleic acid molecule listed in Table 4, and wherein the ALK fusion nucleic acid molecule comprises or results from a corresponding 5′ breakpoint within the chromosomal coordinates as listed in Table 4, and/or a corresponding 3′ breakpoint within the chromosomal coordinates as listed in Table 4. In some embodiments, which may be combined with any of the preceding aspects or embodiments, the ALK fusion nucleic acid molecule is an ALK fusion nucleic acid molecule listed in Table 5, and wherein the ALK fusion nucleic acid molecule comprises or results from a fusion of a corresponding 5′ exon as listed in Table 5, or a portion thereof, fused to a corresponding 3′ exon as listed in Table 5, or a portion thereof. In some embodiments, which may be combined with any of the preceding aspects or embodiments, the ALK fusion nucleic acid molecule is an ALK fusion nucleic acid molecule listed in Table 6, and wherein the ALK fusion nucleic acid molecule comprises, in the 5′ to 3′ direction, the corresponding exons or portions thereof as listed in Table 6. In some embodiments, which may be combined with any of the preceding aspects or embodiments, the ALK fusion nucleic acid molecule is an ALK fusion nucleic acid molecule listed in Table 7, and wherein the ALK fusion nucleic acid molecule comprises a corresponding nucleotide sequence as listed in Table 7, or a nucleotide sequence with at least about 70% homology thereto. In some embodiments, which may be combined with any of the preceding aspects or embodiments, the ALK fusion nucleic acid molecule encodes an ALK fusion polypeptide. In some embodiments, which may be combined with any of the preceding aspects or embodiments, the ALK fusion nucleic acid molecule comprises a nucleotide sequence encoding an ALK fusion polypeptide that comprises an amino acid sequence as listed in Table 8, or an amino acid sequence with at least about 70% homology thereto. In some embodiments, which may be combined with any of the preceding aspects or embodiments, the ALK fusion polypeptide encoded by the ALK fusion nucleic acid molecule comprises an ALK kinase domain, or a fragment of an ALK kinase domain having ALK kinase activity. In some embodiments, which may be combined with any of the preceding aspects or embodiments, the ALK fusion polypeptide encoded by the ALK fusion nucleic acid molecule has ALK kinase activity. In some embodiments, which may be combined with any of the preceding aspects or embodiments, the ALK fusion polypeptide encoded by the ALK fusion nucleic acid molecule has a constitutive ALK kinase activity. In some embodiments, which may be combined with any of the preceding aspects or embodiments, the ALK fusion polypeptide encoded by the ALK fusion nucleic acid molecule is oncogenic. In some embodiments, which may be combined with any of the preceding aspects or embodiments, the ALK fusion polypeptide encoded by the ALK fusion nucleic acid molecule promotes cancer cell survival, angiogenesis, cancer cell proliferation, and any combination thereof. In some embodiments, which may be combined with any of the preceding aspects or embodiments, the ALK fusion polypeptide encoded by the ALK fusion nucleic acid molecule is capable of dimerizing with an ALK polypeptide or with another ALK fusion polypeptide in a cancer cell. In some embodiments, which may be combined with any of the preceding aspects or embodiments, the ALK fusion polypeptide encoded by the ALK fusion nucleic acid molecule is an ALK fusion polypeptide listed in Table 8, and wherein the ALK fusion polypeptide comprises a corresponding amino acid sequence as listed in Table 8, or an amino acid sequence with at least about 70% homology thereto.

[0026] In some embodiments, which may be combined with any of the preceding aspects or embodiments, the cancer is a carcinoma, a sarcoma, a lymphoma, a leukemia, a myeloma, a germ cell cancer, or a blastoma. In some embodiments, which may be combined with any of the preceding aspects or embodiments, the cancer is a solid tumor. In some embodiments, which may be combined with any of the preceding aspects or embodiments, the cancer is a hematologic malignancy. In some embodiments, which may be combined with any of the preceding aspects or embodiments, the cancer is a lymphoma. In some embodiments, which may be combined with any of the preceding aspects or embodiments, the cancer is a non-small cell lung carcinoma, a leiomyosarcoma, a thyroid carcinoma, a colorectal cancer, a pancreatic cancer, or a malignant peritoneal mesothelioma. In some embodiments, which may be combined with any of the preceding aspects or embodiments, the cancer is a B cell cancer, multiple myeloma, a melanoma, breast cancer, lung cancer, bronchus cancer, colorectal cancer, prostate cancer, pancreatic cancer, stomach cancer, ovarian cancer, urinary bladder cancer, brain cancer, central nervous system cancer, peripheral nervous system cancer, esophageal cancer, cervical cancer, uterine cancer, endometrial cancer, cancer of an oral cavity, cancer of a pharynx, liver cancer, kidney cancer, testicular cancer, biliary tract cancer, small bowel cancer, appendix cancer, salivary gland cancer, thyroid gland cancer, adrenal gland cancer, osteosarcoma, chondrosarcoma, a cancer of hematological tissue, an adenocarcinoma, an inflammatory myofibroblastic tumor, a gastrointestinal stromal tumor (GIST), colon cancer, myelodysplastic syndrome (MDS), myeloproliferative disorder (MPD), acute lymphocytic leukemia (ALL), acute myelocytic leukemia (AML), chronic myelocytic leukemia (CML), chronic lymphocytic leukemia (CLL), polycythemia Vera, Hodgkin lymphoma, non-Hodgkin lymphoma (NHL), soft-tissue sarcoma, fibrosarcoma, myxosarcoma, liposarcoma, osteogenic sarcoma, chordoma, angiosarcoma, endotheliosarcoma, lymphangiosarcoma, lymphangioendotheliosarcoma, synovioma, mesothelioma, Ewing's tumor, leiomyosarcoma, rhabdomyosarcoma, squamous cell carcinoma, basal cell carcinoma, adenocarcinoma, sweat gland carcinoma, sebaceous gland carcinoma, papillary carcinoma, papillary adenocarcinomas, medullary carcinoma, bronchogenic carcinoma, renal cell carcinoma, hepatoma, bile duct carcinoma, choriocarcinoma, seminoma, embryonal carcinoma, Wilms' tumor, bladder carcinoma, epithelial carcinoma, glioma, astrocytoma, medulloblastoma, craniopharyngioma, ependymoma, pinealoma, hemangioblastoma, acoustic neuroma, oligodendroglioma, meningioma, neuroblastoma, retinoblastoma, follicular lymphoma, diffuse large B-cell lymphoma, mantle cell lymphoma, hepatocellular carcinoma, thyroid cancer, gastric cancer, head and neck cancer, small cell cancer, essential thrombocythemia, agnogenic myeloid metaplasia, hypereosinophilic syndrome, systemic mastocytosis, familiar hypereosinophilia, chronic eosinophilic leukemia, neuroendocrine cancers, or a carcinoid tumor. In some embodiments, which may be combined with any of the preceding aspects or embodiments, the cancer is an anus squamous cell carcinoma, brain glioblastoma (GBM), breast cancer, breast carcinoma, breast invasive ductal carcinoma (IDC), colon adenocarcinoma (CRC), esophagus adenocarcinoma, fallopian tube serous carcinoma, gallbladder adenocarcinoma, gallbladder carcinoma, gastroesophageal junction adenocarcinoma, lung adenocarcinoma, lung non-small cell lung carcinoma, lung non-small cell lung carcinoma, lymph node Castleman's disease, lymph node lymphoma T-cell, ovary clear cell carcinoma, ovary endometrioid adenocarcinoma, ovary epithelial carcinoma, ovary high grade serous carcinoma, ovary serous carcinoma, pancreas cancer, pancreas ductal adenocarcinoma, pediatric bone osteosarcoma, bone osteosarcoma, pediatric skin melanoma, skin melanoma, pediatric soft tissue sarcoma, soft tissue sarcoma, pediatric soft tissue sarcoma undifferentiated, soft tissue sarcoma undifferentiated, peritoneum serous carcinoma, prostate acinar adenocarcinoma, small intestine adenocarcinoma, soft tissue leiomyosarcoma, soft tissue liposarcoma, thyroid papillary carcinoma, unknown primary adenocarcinoma, unknown primary carcinoma, unknown primary malignant neoplasm, unknown primary myoepithelial carcinoma, uterus carcinosarcoma, uterus endometrial adenocarcinoma endometrioid, uterus leiomyosarcoma, or vulva squamous cell carcinoma (SCC). In some embodiments, which may be combined with any of the preceding aspects or embodiments, the ALK fusion nucleic acid molecule is an ALK fusion nucleic acid molecule listed in Table 9, or the ALK fusion polypeptide is an ALK fusion polypeptide listed in Table 9, and wherein the cancer is the corresponding cancer as listed in Table 9. In some embodiments, which may be combined with any of the preceding aspects or embodiments, the cancer is metastatic. In some embodiments, the cancer has metastasized to the brain of the individual. In some embodiments, the individual has an intracranial metastasis of the cancer. In some embodiments, the individual has an extracranial metastasis of the cancer. In some embodiments, the cancer has not metastasized to the brain of the individual. In some embodiments, the individual does not have an intracranial metastasis of the cancer. In some embodiments, which may be combined with any of the preceding aspects or embodiments, the individual does not have an extracranial metastasis of the cancer.

[0027] In some embodiments, which may be combined with any of the preceding aspects or embodiments, the ALK-targeted therapy comprises one or more of a small molecule inhibitor, an antibody, a cellular therapy, a nucleic acid, a virus-based therapy, an antibody-drug conjugate, a recombinant protein, a fusion protein, a natural compound, a peptide, a PROteolysis-TArgeting Chimera (PROTAC), a treatment for ALK-positive or ALK-rearranged cancer, an ALK-targeted therapy being tested in a clinical trial, a treatment for ALK-positive or ALK-rearranged cancer being tested in a clinical trial, or any combination thereof. In some embodiments, which may be combined with any of the preceding aspects or embodiments, the ALK-targeted therapy is a kinase inhibitor. In some embodiments, the ALK-targeted therapy is a tyrosine kinase inhibitor. In some embodiments, the ALK-targeted therapy is kinase inhibitor that inhibits the kinase activity of an ALK polypeptide. In some embodiments, the ALK-targeted therapy is a multi-kinase inhibitor or an ALK-specific inhibitor. In some embodiments, the ALK-targeted therapy comprises one or more of crizotinib, alectinib, ceritinib, lorlatinib, brigatinib, ensartinib (X-396), repotrectinib (TPX-005), entrectinib (RXDX-101), AZD3463, CEP-37440, belizatinib (TSR-011), ASP3026, KRCA-0008, TQ-B3139, TPX-0131, TAE684 (NVP-TAE684), CT-707, WX-0593, alkotinib, SIM1803-1A, PLB1003, SAF-189s, PF03446962, TQ-B3101, APG-2449, X-376, CEP-28122, and GSK1838705A. In some embodiments, the nucleic acid inhibits the expression of the ALK fusion nucleic acid molecule or polypeptide. In some embodiments, the nucleic acid is a double-stranded RNA (dsRNA), a small interfering RNA (siRNA), or a small hairpin RNA (shRNA). In some embodiments, the cellular therapy is an adoptive therapy, a T cell-based therapy, a natural killer (NK) cell-based therapy, a chimeric antigen receptor (CAR)-T cell therapy, a recombinant T cell receptor (TCR) T cell therapy, a macrophage-based therapy, an induced pluripotent stem cell-based therapy, a B cell-based therapy, or a dendritic cell (DC)-based therapy.

[0028] In some embodiments, which may be combined with any of the preceding aspects or embodiments, the individual has received a prior anti-cancer treatment, or is being treated with an anti-cancer treatment. In some embodiments, the ALK fusion nucleic acid molecule, and/or the ALK fusion polypeptide encoded by the ALK fusion nucleic acid molecule, confers resistance of the cancer to the anti-cancer treatment. In some embodiments, the anti-cancer treatment is a small molecule inhibitor, an antibody, a cellular therapy, a nucleic acid, a virus-based therapy, an antibody-drug conjugate, a recombinant protein, a fusion protein, a natural compound, a peptide, a PROteolysis-TArgeting Chimera (PROTAC), a treatment for cancer being tested in a clinical trial, an immunotherapy, a chemotherapy, a targeted therapy, a non-ALK-targeted anti-cancer therapy, or any combination thereof. In some embodiments, the cellular therapy is an adoptive therapy, a T cell-based therapy, a natural killer (NK) cell-based therapy, a chimeric antigen receptor (CAR)-T cell therapy, a recombinant T cell receptor (TCR) T cell therapy, a macrophage-based therapy, an induced pluripotent stem cell-based therapy, a B cell-based therapy, or a dendritic cell (DC)-based therapy. In some embodiments, which may be combined with any of the preceding aspects or embodiments, the nucleic acid comprises a double-stranded RNA (dsRNA), a small interfering RNA (siRNA), or a small hairpin RNA (shRNA).

[0029] In some embodiments, which may be combined with any of the preceding aspects or embodiments, the cancer has not been previously treated. In some embodiments, which may be combined with any of the preceding aspects or embodiments, the ALK-targeted therapy is a first-line or front-line treatment. In some embodiments, the ALK-targeted therapy is brigatinib. In some embodiments, the ALK-targeted therapy is crizotinib. In some embodiments, the ALK-targeted therapy is lorlatinib. In some embodiments, the ALK-targeted therapy is a kinase inhibitor in combination with a PD-1- or a PD-L1-targeted agent. In some embodiments, the kinase inhibitor is a tyrosine kinase inhibitor. In some embodiments, the kinase inhibitor inhibits the kinase activity of an ALK polypeptide. In some embodiments, the kinase inhibitor is a multi-kinase inhibitor or an ALK-specific inhibitor. In some embodiments, the kinase inhibitor comprises one or more of crizotinib, alectinib, ceritinib, lorlatinib, brigatinib, ensartinib (X-396), repotrectinib (TPX-005), entrectinib (RXDX-101), AZD3463, CEP-37440, belizatinib (TSR-011), ASP3026, KRCA-0008, TQ-B3139, TPX-0131, and TAE684 (NVP-TAE684). In some embodiments, the PD-1-targeted agent is a PD-1 inhibitor. In some embodiments, the PD-1 inhibitor comprises one or more of nivolumab, pembrolizumab, cemiplimab, or dostarlimab. In some embodiments, the PD-L1-targeted agent is a PD-L1 inhibitor. In some embodiments, the PD-L1 inhibitor comprises one or more of atezolizumab, avelumab, or durvalumab. In some embodiments, the ALK-targeted therapy is alectinib in combination with a PD-1- or a PD-L1-targeted agent. In some embodiments, the ALK-targeted therapy is alectinib in combination with atezolizumab. In some embodiments, the cancer is a non-small cell lung carcinoma.

[0030] In some embodiments, which may be combined with any of the preceding aspects or embodiments, the cancer has not been previously treated with crizotinib. In some embodiments, which may be combined with any of the preceding aspects or embodiments, the cancer is crizotinib-naïve. In some embodiments, the ALK-targeted therapy is brigatinib.

[0031] In some embodiments, which may be combined with any of the preceding aspects or embodiments, the cancer is kinase inhibitor-naïve. In some embodiments, which may be combined with any of the preceding aspects or embodiments, the cancer has not been previously treated with a kinase inhibitor. In some embodiments, the ALK-targeted therapy is crizotinib or alectinib. In some embodiments, the ALK-targeted therapy is alectinib. In some embodiments, the ALK-targeted therapy is ceritinib. In some embodiments, the cancer is a non-small cell lung carcinoma. In some embodiments, the cancer is a kinase inhibitor-naïve non-small cell lung carcinoma.

[0032] In some embodiments, which may be combined with any of the preceding aspects or embodiments, the cancer has been previously treated with a kinase inhibitor. In some embodiments, which may be combined with any of the preceding aspects or embodiments, the cancer progressed on a prior treatment with a kinase inhibitor. In some embodiments, which may be combined with any of the preceding aspects or embodiments, the cancer is refractory to a prior kinase inhibitor treatment. In some embodiments, which may be combined with any of the preceding aspects or embodiments, the cancer progressed on a prior treatment with a chemotherapy and a kinase inhibitor. In some embodiments, the kinase inhibitor is a tyrosine kinase inhibitor. In some embodiments, the kinase inhibitor inhibits the kinase activity of an ALK polypeptide. In some embodiments, the kinase inhibitor is a multi-kinase inhibitor or an ALK-specific inhibitor. In some embodiments, the ALK-targeted therapy is lorlatinib. In some embodiments, the kinase inhibitor is crizotinib, and the ALK-targeted therapy is alectinib, ceritinib or brigatinib. In some embodiments, the kinase inhibitor is alectinib, and the ALK-targeted therapy is brigatinib. In some embodiments, the cancer progressed on a prior crizotinib treatment, and wherein the ALK-targeted therapy comprises continued treatment with crizotinib. In some embodiments, the cancer progressed on a prior lorlatinib treatment, and wherein the ALK-targeted therapy comprises continued treatment with lorlatinib. In some embodiments, the kinase inhibitor is crizotinib, and the ALK-targeted therapy is ceritinib. In some embodiments, the cancer is a non-small cell lung carcinoma.

[0033] In some embodiments, which may be combined with any of the preceding aspects or embodiments, the cancer is a solid tumor, and wherein the ALK-targeted therapy is entrectinib. In some embodiments, the cancer is a non-small cell lung carcinoma, a renal cell carcinoma, a colorectal cancer, or an inflammatory myofibroblastic tumor.

[0034] In some embodiments, which may be combined with any of the preceding aspects or embodiments, the ALK-targeted therapy is a fourth line treatment. In some embodiments, the ALK-targeted therapy is lorlatinib. In some embodiments, the cancer is an inflammatory myofibroblastic sarcoma, optionally, wherein the inflammatory myofibroblastic sarcoma is metastatic. In some embodiments, the individual has leptomeningeal disease.

[0035] In some embodiments, which may be combined with any of the preceding aspects or embodiments, the cancer further comprises one or more mutations in an ALK kinase domain encoded by an ALK gene. In some embodiments, which may be combined with any of the preceding aspects or embodiments, the ALK fusion nucleic acid molecule encodes an ALK fusion polypeptide comprising an ALK kinase domain, or a portion thereof, comprising one or more mutations in the ALK kinase domain. In some embodiments, which may be combined with any of the preceding aspects or embodiments, the ALK fusion polypeptide encoded by the ALK fusion nucleic acid molecule comprises an ALK kinase domain, or a portion thereof, comprising one or more mutations in the ALK kinase domain. In some embodiments, the one or more mutations in the ALK kinase domain comprise an amino acid substitution at amino acid position G1202 of the ALK kinase domain, optionally wherein the amino acid substitution is a G1202R amino acid substitution. In some embodiments, the ALK-targeted therapy is lorlatinib.

[0036] In some embodiments, which may be combined with any of the preceding aspects or embodiments, the cancer was previously treated with crizotinib, and wherein the ALK-targeted therapy is brigatinib. In some embodiments, the cancer is a non-small cell lung carcinoma.

[0037] In some embodiments, which may be combined with any of the preceding aspects or embodiments, the cancer is a colorectal cancer, and wherein the ALK-targeted therapy is ceritinib.

[0038] In some embodiments, which may be combined with any of the preceding aspects or embodiments, the cancer is a pancreatic cancer, and wherein the ALK-targeted therapy is ceritinib. In some embodiments, the cancer is a pancreatic ductal adenocarcinoma.

[0039] In some embodiments, which may be combined with any of the preceding aspects or embodiments, the ALK-targeted therapy is a kinase inhibitor in combination with a PD-1- or a PD-L1-targeted agent. In some embodiments, the kinase inhibitor is a tyrosine kinase inhibitor. In some embodiments, the kinase inhibitor inhibits the kinase activity of an ALK polypeptide. In some embodiments, the kinase inhibitor is a multi-kinase inhibitor or an ALK-specific inhibitor. In some embodiments, the kinase inhibitor comprises one or more of crizotinib, alectinib, ceritinib, lorlatinib, brigatinib, ensartinib (X-396), repotrectinib (TPX-005), entrectinib (RXDX-101), AZD3463, CEP-37440, belizatinib (TSR-011), ASP3026, KRCA-0008, TQ-B3139, TPX-0131, and TAE684 (NVP-TAE684). In some embodiments, the PD-1-targeted agent is a PD-1 inhibitor. In some embodiments, the PD-1 inhibitor comprises one or more of nivolumab, pembrolizumab, cemiplimab, or dostarlimab. In some embodiments, the PD-L1-targeted agent is a PD-L1 inhibitor. In some embodiments, the PD-L1 inhibitor comprises one or more of atezolizumab, avelumab, or durvalumab. In some embodiments, the ALK-targeted therapy is lorlatinib in combination with avelumab. In some embodiments, the cancer is a non-small cell lung carcinoma.

[0040] In some embodiments, which may be combined with any of the preceding aspects or embodiments, the treatment or the one or more treatment options further comprise an additional anti-cancer therapy. In some embodiments, the additional anti-cancer therapy comprises one or more of a small molecule inhibitor, a chemotherapeutic agent, a cancer immunotherapy, an antibody, a cellular therapy, a nucleic acid, a surgery, a radiotherapy, an anti-angiogenic therapy, an anti-DNA repair therapy, an anti-inflammatory therapy, an anti-neoplastic agent, a growth inhibitory agent, a cytotoxic agent, a vaccine, a small molecule agonist, a virus-based therapy, an antibody-drug conjugate, a recombinant protein, a fusion protein, a natural compound, a peptide, a PROteolysis-TArgeting Chimera (PROTAC), or any combination thereof. In some embodiments, the cellular therapy is an adoptive therapy, a T cell-based therapy, a natural killer (NK) cell-based therapy, a chimeric antigen receptor (CAR)-T cell therapy, a recombinant T cell receptor (TCR) T cell therapy, a macrophage-based therapy, an induced pluripotent stem cell-based therapy, a B cell-based therapy, or a dendritic cell (DC)-based therapy. In some embodiments, the additional anti-cancer therapy comprises one or more of a heat shock protein 90 inhibitor, an EGFR inhibitor, a SHP2 inhibitor, a MEK inhibitor, an IGF-1R inhibitor, a vascular endothelial growth factor (VEGF)-targeted therapy, or an mTOR inhibitor. In some embodiments, the nucleic acid comprises a double-stranded RNA (dsRNA), a small interfering RNA (siRNA), or a small hairpin RNA (shRNA).

[0041] In some embodiments, which may be combined with any of the preceding aspects or embodiments, the method further comprises obtaining the sample from the individual. In some embodiments, which may be combined with any of the preceding aspects or embodiments, the sample is obtained from the cancer. In some embodiments, which may be combined with any of the preceding aspects or embodiments, the sample comprises a tissue biopsy sample, a liquid biopsy sample, or a normal control. In some embodiments, which may be combined with any of the preceding aspects or embodiments, the sample is from a tumor biopsy, tumor specimen, or circulating tumor cell. In some embodiments, which may be combined with any of the preceding aspects or embodiments, the sample is a liquid biopsy sample and comprises blood, plasma, cerebrospinal fluid, sputum, stool, urine, or saliva. In some embodiments, which may be combined with any of the preceding aspects or embodiments, the sample comprises cells and/or nucleic acids from the cancer. In some embodiments, the sample comprises mRNA, DNA, circulating tumor DNA (ctDNA), cell-free DNA, or cell-free RNA from the cancer. In some embodiments, the sample is a liquid biopsy sample and comprises circulating tumor cells (CTCs). In some embodiments, the sample is a liquid biopsy sample and comprises cell-free DNA (cfDNA), circulating tumor DNA (ctDNA), or any combination thereof. In some embodiments, which may be combined with any of the preceding aspects or embodiments, the method comprises acquiring knowledge of or detecting the ALK fusion nucleic acid molecule or the ALK fusion polypeptide encoded by the ALK fusion nucleic acid molecule in a tissue biopsy sample, in a liquid biopsy sample, or in both a tissue biopsy sample and a liquid biopsy sample, from the individual.

[0042] In some embodiments, which may be combined with any of the preceding aspects or embodiments, the acquiring knowledge of the ALK fusion nucleic acid molecule or the ALK fusion polypeptide encoded by the ALK fusion nucleic acid molecule comprises detecting the ALK fusion nucleic acid molecule or polypeptide in the sample. In some embodiments, which may be combined with any of the preceding aspects or embodiments, detecting the ALK fusion nucleic acid molecule in the sample comprises detecting a fragment of the ALK fusion nucleic acid molecule comprising a breakpoint or fusion junction between the ALK gene, or the portion thereof, and the gene listed in Table 1, or the portion thereof. In some embodiments, which may be combined with any of the preceding aspects or embodiments, the ALK fusion nucleic acid molecule is detected in the sample by one or more of: a nucleic acid hybridization assay, an amplification-based assay, a polymerase chain reaction-restriction fragment length polymorphism (PCR-RFLP) assay, real-time PCR, a screening analysis, fluorescence in situ hybridization (FISH), spectral karyotyping, multicolor FISH (mFISH), comparative genomic hybridization, in situ hybridization, sequence-specific priming (SSP) PCR, high-performance liquid chromatography (HPLC), mass-spectrometric genotyping, or sequencing. In some embodiments, the sequencing comprises a massively parallel sequencing (MPS) technique, whole genome sequencing (WGS), whole exome sequencing, targeted sequencing, direct sequencing, or a Sanger sequencing technique; and optionally wherein the massively parallel sequencing (MPS) technique comprises next-generation sequencing (NGS).

[0043] In some embodiments, which may be combined with any of the preceding aspects or embodiments, detecting the ALK fusion polypeptide comprises detecting a portion of the ALK fusion polypeptide that is encoded by a fragment of the ALK fusion nucleic acid molecule that comprises a breakpoint or fusion junction between the ALK gene, or the portion thereof, and the gene listed in Table 1, or the portion thereof. In some embodiments, which may be combined with any of the preceding aspects or embodiments, the ALK fusion polypeptide is detected in the sample by one or more of: immunoblotting, enzyme linked immunosorbent assay (ELISA), immunohistochemistry, or mass spectrometry.

[0044] In some embodiments, which may be combined with any of the preceding aspects or embodiments, the method further comprises selectively enriching for one or more nucleic acids in the sample comprising nucleotide sequences corresponding to the ALK fusion nucleic acid molecule; wherein the selectively enriching produces an enriched sample. In some embodiments, the selectively enriching comprises: (a) combining one or more bait molecules with the sample, thereby hybridizing the one or more bait molecules to one or more nucleic acids in the sample comprising nucleotide sequences corresponding to the ALK fusion nucleic acid molecule and producing nucleic acid hybrids; and (b) isolating the nucleic acid hybrids to produce the enriched sample. In some embodiments, which may be combined with any of the preceding aspects or embodiments, the one or more bait molecules comprise a capture nucleic acid molecule configured to hybridize to a nucleotide sequence corresponding to the ALK fusion nucleic acid molecule. In some embodiments, the capture nucleic acid molecule comprises between about 10 and about 30 nucleotides, between about 50 and about 1000 nucleotides, between about 100 and about 500 nucleotides, between about 100 and about 300 nucleotides, or between about 100 and about 200 nucleotides. In some embodiments, which may be combined with any of the preceding aspects or embodiments, the one or more bait molecules are conjugated to an affinity reagent or to a detection reagent. In some embodiments, the affinity reagent is an antibody, an antibody fragment, or biotin, or wherein the detection reagent is a fluorescent marker. In some embodiments, the capture nucleic acid molecule comprises a DNA, RNA, or mixed DNA/RNA molecule. In some embodiments, which may be combined with any of the preceding aspects or embodiments, the selectively enriching comprises amplifying the one or more nucleic acid molecules comprising nucleotide sequences corresponding to the ALK fusion nucleic acid molecule using a polymerase chain reaction (PCR) to produce an enriched sample. In some embodiments, which may be combined with any of the preceding aspects or embodiments, the method further comprises sequencing the enriched sample.

[0045] In some embodiments, which may be combined with any of the preceding aspects or embodiments, the method further comprises acquiring knowledge of or detecting in a sample from the individual a base substitution, a short insertion/deletion (indel), a copy number alteration, or a genomic rearrangement in one or more genes.

[0046] In some embodiments, which may be combined with any of the preceding aspects or embodiments, the ALK fusion nucleic acid molecule is an ALK fusion nucleic acid molecule listed in Table 2, and wherein the order of the genes in the fusion in the 5′ to 3′ direction is as listed in Table 2; the ALK fusion nucleic acid molecule is an ALK fusion nucleic acid molecule listed in Table 3, and wherein the ALK fusion nucleic acid molecule comprises or results from a corresponding 5′ breakpoint and/or 3′ breakpoint within the exons or introns as listed in Table 3; the ALK fusion nucleic acid molecule is an ALK fusion nucleic acid molecule listed in Table 4, and wherein the ALK fusion nucleic acid molecule comprises or results from a corresponding 5′ breakpoint within the chromosomal coordinates as listed in Table 4, and/or a corresponding 3′ breakpoint within the chromosomal coordinates as listed in Table 4; the ALK fusion nucleic acid molecule is an ALK fusion nucleic acid molecule listed in Table 5, and wherein the ALK fusion nucleic acid molecule comprises or results from a fusion of a corresponding 5′ exon as listed in Table 5, or a portion thereof, fused to a corresponding 3′ exon as listed in Table 5, or a portion thereof; the ALK fusion nucleic acid molecule is an ALK fusion nucleic acid molecule listed in Table 6, and wherein the ALK fusion nucleic acid molecule comprises, in the 5′ to 3′ direction, the corresponding exons or portions thereof as listed in Table 6; the ALK fusion nucleic acid molecule is an ALK fusion nucleic acid molecule listed in Table 7, and wherein the ALK fusion nucleic acid molecule comprises a corresponding nucleotide sequence as listed in Table 7, or a nucleotide sequence with at least about 70% homology thereto; and/or the ALK fusion nucleic acid molecule comprises a nucleotide sequence encoding an ALK fusion polypeptide that comprises an amino acid sequence as listed in Table 8, or an amino acid sequence with at least about 70% homology thereto.

[0047] In some embodiments, which may be combined with any of the preceding aspects or embodiments, the ALK fusion polypeptide encoded by the ALK fusion nucleic acid molecule: (a) comprises an ALK kinase domain, or a fragment of an ALK kinase domain having ALK kinase activity; (b) has ALK kinase activity; (c) has constitutive ALK kinase activity; (d) is oncogenic; (e) promotes cancer cell survival, angiogenesis, cancer cell proliferation, and any combination thereof; (f) is capable of dimerizing with an ALK polypeptide or with another ALK fusion polypeptide in a cancer cell; and/or (g) is an ALK fusion polypeptide listed in Table 8, and wherein the ALK fusion polypeptide comprises a corresponding amino acid sequence as listed in Table 8, or an amino acid sequence with at least about 70% homology thereto.

[0048] In some embodiments, which may be combined with any of the preceding aspects or embodiments, the cancer is: (a) a carcinoma, a sarcoma, a lymphoma, a leukemia, a myeloma, a germ cell cancer, or a blastoma; (b) a solid tumor; (c) a hematologic malignancy; (d) a lymphoma; (e) a non-small cell lung carcinoma, a leiomyosarcoma, a thyroid carcinoma, a colorectal cancer, a pancreatic cancer, or a malignant peritoneal mesothelioma; (f) a B cell cancer, multiple myeloma, a melanoma, breast cancer, lung cancer, bronchus cancer, colorectal cancer, prostate cancer, pancreatic cancer, stomach cancer, ovarian cancer, urinary bladder cancer, brain cancer, central nervous system cancer, peripheral nervous system cancer, esophageal cancer, cervical cancer, uterine cancer, endometrial cancer, cancer of an oral cavity, cancer of a pharynx, liver cancer, kidney cancer, testicular cancer, biliary tract cancer, small bowel cancer, appendix cancer, salivary gland cancer, thyroid gland cancer, adrenal gland cancer, osteosarcoma, chondrosarcoma, a cancer of hematological tissue, an adenocarcinoma, an inflammatory myofibroblastic tumor, a gastrointestinal stromal tumor (GIST), colon cancer, myelodysplastic syndrome (MDS), myeloproliferative disorder (MPD), acute lymphocytic leukemia (ALL), acute myelocytic leukemia (AML), chronic myelocytic leukemia (CML), chronic lymphocytic leukemia (CLL), polycythemia Vera, Hodgkin lymphoma, non-Hodgkin lymphoma (NHL), soft-tissue sarcoma, fibrosarcoma, myxosarcoma, liposarcoma, osteogenic sarcoma, chordoma, angiosarcoma, endotheliosarcoma, lymphangiosarcoma, lymphangioendotheliosarcoma, synovioma, mesothelioma, Ewing's tumor, leiomyosarcoma, rhabdomyosarcoma, squamous cell carcinoma, basal cell carcinoma, adenocarcinoma, sweat gland carcinoma, sebaceous gland carcinoma, papillary carcinoma, papillary adenocarcinomas, medullary carcinoma, bronchogenic carcinoma, renal cell carcinoma, hepatoma, bile duct carcinoma, choriocarcinoma, seminoma, embryonal carcinoma, Wilms' tumor, bladder carcinoma, epithelial carcinoma, glioma, astrocytoma, medulloblastoma, craniopharyngioma, ependymoma, pinealoma, hemangioblastoma, acoustic neuroma, oligodendroglioma, meningioma, neuroblastoma, retinoblastoma, follicular lymphoma, diffuse large B-cell lymphoma, mantle cell lymphoma, hepatocellular carcinoma, thyroid cancer, gastric cancer, head and neck cancer, small cell cancer, essential thrombocythemia, agnogenic myeloid metaplasia, hypereosinophilic syndrome, systemic mastocytosis, familiar hypereosinophilia, chronic eosinophilic leukemia, neuroendocrine cancers, or a carcinoid tumor; or (g) an anus squamous cell carcinoma, brain glioblastoma (GBM), breast cancer, breast carcinoma, breast invasive ductal carcinoma (IDC), colon adenocarcinoma (CRC), esophagus adenocarcinoma, fallopian tube serous carcinoma, gallbladder adenocarcinoma, gallbladder carcinoma, gastroesophageal junction adenocarcinoma, lung adenocarcinoma, lung non-small cell lung carcinoma, lung non-small cell lung carcinoma, lymph node Castleman's disease, lymph node lymphoma T-cell, ovary clear cell carcinoma, ovary endometrioid adenocarcinoma, ovary epithelial carcinoma, ovary high grade serous carcinoma, ovary serous carcinoma, pancreas cancer, pancreas ductal adenocarcinoma, pediatric bone osteosarcoma, bone osteosarcoma, pediatric skin melanoma, skin melanoma, pediatric soft tissue sarcoma, soft tissue sarcoma, pediatric soft tissue sarcoma undifferentiated, soft tissue sarcoma undifferentiated, peritoneum serous carcinoma, prostate acinar adenocarcinoma, small intestine adenocarcinoma, soft tissue leiomyosarcoma, soft tissue liposarcoma, thyroid papillary carcinoma, unknown primary adenocarcinoma, unknown primary carcinoma, unknown primary malignant neoplasm, unknown primary myoepithelial carcinoma, uterus carcinosarcoma, uterus endometrial adenocarcinoma endometrioid, uterus leiomyosarcoma, or vulva squamous cell carcinoma (SCC). In some embodiments, which may be combined with any of the preceding aspects or embodiments, the ALK fusion nucleic acid molecule is an ALK fusion nucleic acid molecule listed in Table 9 or the ALK fusion polypeptide is an ALK fusion polypeptide listed in Table 9, and wherein the cancer is the corresponding cancer as listed in Table 9. In some embodiments, which may be combined with any of the preceding aspects or embodiments, the cancer is metastatic; the cancer has metastasized to the brain of the individual; the individual has an intracranial metastasis of the cancer or an extracranial metastasis of the cancer; the cancer has not metastasized to the brain of the individual; the individual does not have an intracranial metastasis of the cancer; or the individual does not have an extracranial metastasis of the cancer.

[0049] In some embodiments, which may be combined with any of the preceding aspects or embodiments, the ALK-targeted therapy: (a) comprises one or more of a small molecule inhibitor, an antibody, a cellular therapy, a nucleic acid, a virus-based therapy, an antibody-drug conjugate, a recombinant protein, a fusion protein, a natural compound, a peptide, a PROteolysis-TArgeting Chimera (PROTAC), a treatment for ALK-positive or ALK-rearranged cancer, an ALK-targeted therapy being tested in a clinical trial, a treatment for ALK-positive or ALK-rearranged cancer being tested in a clinical trial, or any combination thereof; (b) is a kinase inhibitor; (c) is a tyrosine kinase inhibitor, a kinase inhibitor that inhibits the kinase activity of an ALK polypeptide, a multi-kinase inhibitor, or an ALK-specific inhibitor; or (d) comprises one or more of crizotinib, alectinib, ceritinib, lorlatinib, brigatinib, ensartinib (X-396), repotrectinib (TPX-005), entrectinib (RXDX-101), AZD3463, CEP-37440, belizatinib (TSR-011), ASP3026, KRCA-0008, TQ-B3139, TPX-0131, TAE684 (NVP-TAE684), CT-707, WX-0593, alkotinib, SIM1803-1A, PLB1003, SAF-189s, PF03446962, TQ-B3101, APG-2449, X-376, CEP-28122, and GSK1838705A.

[0050] In some embodiments, which may be combined with any of the preceding aspects or embodiments, the individual has received a prior anti-cancer treatment, or is being treated with an anti-cancer treatment; the cancer has not been previously treated; the cancer has not been previously treated with crizotinib; the cancer has not been previously treated with a kinase inhibitor; the cancer has been previously treated with a kinase inhibitor; or the cancer progressed on a prior treatment with a kinase inhibitor or is refractory to a prior kinase inhibitor treatment.

[0051] In some embodiments, which may be combined with any of the preceding aspects or embodiments, the ALK fusion nucleic acid molecule and/or the ALK fusion polypeptide encoded by the ALK fusion nucleic acid molecule confer resistance of the cancer to the prior anti-cancer treatment.

[0052] In some embodiments, which may be combined with any of the preceding aspects or embodiments, the cancer further comprises one or more mutations or rearrangements in an ALK kinase domain encoded by an ALK gene, and/or the ALK fusion nucleic acid molecule encodes an ALK fusion polypeptide comprising an ALK kinase domain, or a portion thereof, comprising one or more mutations in the ALK kinase domain.

[0053] In some embodiments, which may be combined with any of the preceding aspects or embodiments, the treatment further comprises an additional anti-cancer therapy. In some embodiments, the additional anti-cancer therapy comprises: (a) one or more of a small molecule inhibitor, a chemotherapeutic agent, a cancer immunotherapy, an antibody, a cellular therapy, a nucleic acid, a surgery, a radiotherapy, an anti-angiogenic therapy, an anti-DNA repair therapy, an anti-inflammatory therapy, an anti-neoplastic agent, a growth inhibitory agent, a cytotoxic agent, a vaccine, a small molecule agonist, a virus-based therapy, an antibody-drug conjugate, a recombinant protein, a fusion protein, a natural compound, a peptide, a PROteolysis-TArgeting Chimera (PROTAC), or any combination thereof; or (b) one or more of a heat shock protein 90 inhibitor, an EGFR inhibitor, a SHP2 inhibitor, a MEK inhibitor, an IGF-1R inhibitor, a vascular endothelial growth factor (VEGF)-targeted therapy, or an mTOR inhibitor.

[0054] In some embodiments, which may be combined with any of the preceding aspects or embodiments, the method further comprises obtaining the sample from the individual; the sample is obtained from the cancer; the sample comprises a tissue biopsy sample, a tumor biopsy sample, a tumor specimen, a liquid biopsy sample, a normal control, circulating tumor cells, circulating tumor DNA (ctDNA), cell-free DNA, or cell-free RNA; and/or the sample comprises cells and/or nucleic acids from the cancer.

[0055] In some embodiments, which may be combined with any of the preceding aspects or embodiments, the acquiring knowledge of the ALK fusion nucleic acid molecule or the ALK fusion polypeptide encoded by the ALK fusion nucleic acid molecule comprises detecting the ALK fusion nucleic acid molecule or polypeptide in the sample.

[0056] In some embodiments, which may be combined with any of the preceding aspects or embodiments, detecting the ALK fusion nucleic acid molecule in the sample comprises detecting a fragment of the ALK fusion nucleic acid molecule comprising a breakpoint or fusion junction between the ALK gene, or the portion thereof, and the gene listed in Table 1, or the portion thereof; and/or (b) detecting the ALK fusion polypeptide comprises detecting a portion of the ALK fusion polypeptide that is encoded by a fragment of the ALK fusion nucleic acid molecule that comprises a breakpoint or fusion junction between the ALK gene, or the portion thereof, and the gene listed in Table 1, or the portion thereof. In some embodiments, which may be combined with any of the preceding aspects or embodiments, the ALK fusion nucleic acid molecule is detected in the sample by one or more of: a nucleic acid hybridization assay, an amplification-based assay, a polymerase chain reaction-restriction fragment length polymorphism (PCR-RFLP) assay, real-time PCR, a screening analysis, fluorescence in situ hybridization (FISH), spectral karyotyping, multicolor FISH (mFISH), comparative genomic hybridization, in situ hybridization, sequence-specific priming (SSP) PCR, high-performance liquid chromatography (HPLC), mass-spectrometric genotyping, or sequencing; and/or the ALK fusion polypeptide is detected in the sample by one or more of: immunoblotting, enzyme linked immunosorbent assay (ELISA), immunohistochemistry, or mass spectrometry.

[0057] In some embodiments, which may be combined with any of the preceding aspects or embodiments, the method further comprises acquiring knowledge of or detecting in a sample from the individual a base substitution, a short insertion/deletion (indel), a copy number alteration, or a genomic rearrangement in one or more genes.

[0058] In some embodiments, which may be combined with any of the preceding aspects or embodiments, the individual is a human.

[0059] In another aspect, provided herein is a kit comprising a probe or bait for detecting an ALK fusion nucleic acid molecule comprising a fusion between an ALK gene, or a portion thereof, and a gene listed in Table 1, or a portion thereof. In another aspect, provided herein is a kit comprising a probe or bait for detecting any of the ALK fusion nucleic acid molecules provided herein.

[0060] In another aspect, provided herein is a nucleic acid encoding an ALK fusion nucleic acid molecule, or a fragment thereof, comprising a fusion between an ALK gene, or a portion thereof, and a gene listed in Table 1, or a portion thereof. In another aspect, provided herein is a nucleic acid encoding any of the ALK fusion nucleic acid molecules provided herein, or a portion thereof.

[0061] In another aspect, provided herein is a vector comprising any of the nucleic acids provided herein. In another aspect, provided herein is a host cell comprising any of the vectors provided herein.

[0062] In another aspect, provided herein is an antibody or antibody fragment that specifically binds to an ALK fusion polypeptide, or to a portion thereof, wherein the ALK fusion polypeptide is encoded by an ALK fusion nucleic acid molecule comprising a fusion between an ALK gene, or a portion thereof, and a gene listed in Table 1, or a portion thereof. In another aspect, provided herein is an antibody or antibody fragment that specifically binds to any of the ALK fusion polypeptides provided herein, or to a portion thereof. In another aspect, provided herein is a kit comprising any of the antibodies or antibody fragments provided herein.

[0063] In another aspect, provided herein is an in vitro use of one or more oligonucleotides for detecting an ALK fusion nucleic acid molecule comprising a fusion between an ALK gene, or a portion thereof, and a gene listed in Table 1, or a portion thereof. In another aspect, provided herein is an in vitro use of one or more oligonucleotides for detecting any of the ALK fusion nucleic acid molecules provided herein, or a portion thereof. In another aspect, provided herein is a kit comprising one or more oligonucleotides for detecting an ALK fusion nucleic acid molecule comprising a fusion between an ALK gene, or a portion thereof, and a gene listed in Table 1, or a portion thereof. In another aspect, provided herein is a kit comprising one or more oligonucleotides for detecting any of the ALK fusion nucleic acid molecules provided herein, or a portion thereof.

[0064] In another aspect, provided herein is a system, comprising: a memory configured to store one or more program instructions; and one or more processors configured to execute the one or more program instructions, the one or more program instructions when executed by the one or more processors are configured to: (a) obtain a plurality of sequence reads of one or more nucleic acid molecules, wherein the one or more nucleic acid molecules are derived from a sample obtained from an individual; (b) analyze the plurality of sequence reads for the presence of an ALK fusion nucleic acid molecule comprising a fusion between an ALK gene, or a portion thereof, and a gene listed in Table 1, or a portion thereof; and (c) detect, based on the analyzing, the ALK fusion nucleic acid molecule in the sample.

[0065] In another aspect, provided herein is a non-transitory computer readable storage medium comprising one or more programs executable by one or more computer processors for performing a method, comprising: (a) obtaining, using the one or more processors, a plurality of sequence reads of one or more nucleic acid molecules, wherein the one or more nucleic acid molecules are derived from a sample obtained from an individual; (b) analyzing, using the one or more processors, the plurality of sequence reads for the presence of an ALK fusion nucleic acid molecule comprising a fusion between an ALK gene, or a portion thereof, and a gene listed in Table 1, or a portion thereof; and (c) detecting, using the one or more processors and based on the analyzing, the ALK fusion nucleic acid molecule in the sample.

[0066] In some embodiments, which may be combined with any of the preceding aspects or embodiments, the sample is from an individual having a cancer. In some embodiments, which may be combined with any of the preceding aspects or embodiments, the plurality of sequence reads is obtained by sequencing, whole exome sequencing, whole genome sequencing, gene-targeted sequencing, or next-generation sequencing. In some embodiments, which may be combined with any of the preceding aspects or embodiments, the ALK fusion nucleic acid molecule is an ALK fusion nucleic acid molecule listed in Table 2, and wherein the order of the genes in the fusion in the 5′ to 3′ direction is as listed in Table 2. In some embodiments, which may be combined with any of the preceding aspects or embodiments, the ALK fusion nucleic acid molecule is an ALK fusion nucleic acid molecule listed in Table 3, and wherein the ALK fusion nucleic acid molecule comprises or results from a corresponding 5′ breakpoint and/or 3′ breakpoint within the exons or introns as listed in Table 3. In some embodiments, which may be combined with any of the preceding aspects or embodiments, the ALK fusion nucleic acid molecule is an ALK fusion nucleic acid molecule listed in Table 4, and wherein the ALK fusion nucleic acid molecule comprises or results from a corresponding 5′ breakpoint within the chromosomal coordinates as listed in Table 4, and/or a corresponding 3′ breakpoint within the chromosomal coordinates as listed in Table 4. In some embodiments, which may be combined with any of the preceding aspects or embodiments, the ALK fusion nucleic acid molecule is an ALK fusion nucleic acid molecule listed in Table 5, and wherein the ALK fusion nucleic acid molecule comprises or results from a fusion of a corresponding 5′ exon as listed in Table 5, or a portion thereof, fused to a corresponding 3′ exon as listed in Table 5, or a portion thereof. In some embodiments, which may be combined with any of the preceding aspects or embodiments, the ALK fusion nucleic acid molecule is an ALK fusion nucleic acid molecule listed in Table 6, and wherein the ALK fusion nucleic acid molecule comprises, in the 5′ to 3′ direction, the corresponding exons or portions thereof as listed in Table 6. In some embodiments, which may be combined with any of the preceding aspects or embodiments, the ALK fusion nucleic acid molecule is an ALK fusion nucleic acid molecule listed in Table 7, and wherein the ALK fusion nucleic acid molecule comprises a corresponding nucleotide sequence as listed in Table 7, or a nucleotide sequence with at least about 70% homology thereto. In some embodiments, which may be combined with any of the preceding aspects or embodiments, the ALK fusion nucleic acid molecule encodes an ALK fusion polypeptide. In some embodiments, which may be combined with any of the preceding aspects or embodiments, the ALK fusion nucleic acid molecule comprises a nucleotide sequence encoding an ALK fusion polypeptide that comprises an amino acid sequence as listed in Table 8, or an amino acid sequence with at least about 70% homology thereto. In some embodiments, which may be combined with any of the preceding aspects or embodiments, the encoded ALK fusion polypeptide comprises an ALK kinase domain, or a fragment of an ALK kinase domain, having ALK kinase activity. In some embodiments, which may be combined with any of the preceding aspects or embodiments, the encoded ALK fusion polypeptide has ALK kinase activity. In some embodiments, which may be combined with any of the preceding aspects or embodiments, the encoded ALK fusion polypeptide has a constitutive ALK kinase activity. In some embodiments, which may be combined with any of the preceding aspects or embodiments, the encoded ALK fusion polypeptide is oncogenic. In some embodiments, which may be combined with any of the preceding aspects or embodiments, the encoded ALK fusion polypeptide promotes cancer cell survival, angiogenesis, cancer cell proliferation, and any combination thereof. In some embodiments, which may be combined with any of the preceding aspects or embodiments, the encoded ALK fusion polypeptide is capable of dimerizing with an ALK polypeptide or with another ALK fusion polypeptide in a cancer cell. In some embodiments, which may be combined with any of the preceding aspects or embodiments, the encoded ALK fusion polypeptide is an ALK fusion polypeptide listed in Table 8, and wherein the encoded ALK fusion polypeptide comprises a corresponding amino acid sequence as listed in Table 8, or an amino acid sequence with at least about 70% homology thereto.

[0067] In some embodiments, which may be combined with any of the preceding aspects or embodiments, the cancer is a carcinoma, a sarcoma, a lymphoma, a leukemia, a myeloma, a germ cell cancer, or a blastoma. In some embodiments, which may be combined with any of the preceding aspects or embodiments, the cancer is a solid tumor. In some embodiments, which may be combined with any of the preceding aspects or embodiments, the cancer is a hematologic malignancy. In some embodiments, which may be combined with any of the preceding aspects or embodiments, the cancer is a lymphoma. In some embodiments, which may be combined with any of the preceding aspects or embodiments, the cancer is a non-small cell lung carcinoma, a leiomyosarcoma, a thyroid carcinoma, a colorectal cancer, a pancreatic cancer, or a malignant peritoneal mesothelioma. In some embodiments, which may be combined with any of the preceding aspects or embodiments, the cancer is a B cell cancer, a melanoma, breast cancer, lung cancer, bronchus cancer, colorectal cancer, prostate cancer, pancreatic cancer, stomach cancer, ovarian cancer, urinary bladder cancer, brain cancer, central nervous system cancer, peripheral nervous system cancer, esophageal cancer, cervical cancer, uterine cancer, endometrial cancer, cancer of an oral cavity, cancer of a pharynx, liver cancer, kidney cancer, testicular cancer, biliary tract cancer, small bowel cancer, appendix cancer, salivary gland cancer, thyroid gland cancer, adrenal gland cancer, osteosarcoma, chondrosarcoma, a cancer of hematological tissue, an adenocarcinoma, an inflammatory myofibroblastic tumor, a gastrointestinal stromal tumor (GIST), colon cancer, multiple myeloma (MM), myelodysplastic syndrome (MDS), myeloproliferative disorder (MPD), acute lymphocytic leukemia (ALL), acute myelocytic leukemia (AML), chronic myelocytic leukemia (CML), chronic lymphocytic leukemia (CLL), polycythemia Vera, Hodgkin lymphoma, non-Hodgkin lymphoma (NHL), soft-tissue sarcoma, fibrosarcoma, myxosarcoma, liposarcoma, osteogenic sarcoma, chordoma, angiosarcoma, endotheliosarcoma, lymphangiosarcoma, lymphangioendotheliosarcoma, synovioma, mesothelioma, Ewing's tumor, leiomyosarcoma, rhabdomyosarcoma, squamous cell carcinoma, basal cell carcinoma, adenocarcinoma, sweat gland carcinoma, sebaceous gland carcinoma, papillary carcinoma, papillary adenocarcinomas, medullary carcinoma, bronchogenic carcinoma, renal cell carcinoma, hepatoma, bile duct carcinoma, choriocarcinoma, seminoma, embryonal carcinoma, Wilms' tumor, bladder carcinoma, epithelial carcinoma, glioma, astrocytoma, medulloblastoma, craniopharyngioma, ependymoma, pinealoma, hemangioblastoma, acoustic neuroma, oligodendroglioma, meningioma, neuroblastoma, retinoblastoma, follicular lymphoma, diffuse large B-cell lymphoma, mantle cell lymphoma, hepatocellular carcinoma, thyroid cancer, gastric cancer, head and neck cancer, small cell cancer, essential thrombocythemia, agnogenic myeloid metaplasia, hypereosinophilic syndrome, systemic mastocytosis, familiar hypereosinophilia, chronic eosinophilic leukemia, neuroendocrine cancers, or a carcinoid tumor. In some embodiments, which may be combined with any of the preceding aspects or embodiments, the cancer is an anus squamous cell carcinoma, brain glioblastoma (GBM), breast cancer, breast carcinoma, breast invasive ductal carcinoma (IDC), colon adenocarcinoma (CRC), esophagus adenocarcinoma, fallopian tube serous carcinoma, gallbladder adenocarcinoma, gallbladder carcinoma, gastroesophageal junction adenocarcinoma, lung adenocarcinoma, lung non-small cell lung carcinoma, lung non-small cell lung carcinoma, lymph node Castleman's disease, lymph node lymphoma T-cell, ovary clear cell carcinoma, ovary endometrioid adenocarcinoma, ovary epithelial carcinoma, ovary high grade serous carcinoma, ovary serous carcinoma, pancreas cancer, pancreas ductal adenocarcinoma, pediatric bone osteosarcoma, bone osteosarcoma, pediatric skin melanoma, skin melanoma, pediatric soft tissue sarcoma, soft tissue sarcoma, pediatric soft tissue sarcoma undifferentiated, soft tissue sarcoma undifferentiated, peritoneum serous carcinoma, prostate acinar adenocarcinoma, small intestine adenocarcinoma, soft tissue leiomyosarcoma, soft tissue liposarcoma, thyroid papillary carcinoma, unknown primary adenocarcinoma, unknown primary carcinoma, unknown primary malignant neoplasm, unknown primary myoepithelial carcinoma, uterus carcinosarcoma, uterus endometrial adenocarcinoma endometrioid, uterus leiomyosarcoma, or vulva squamous cell carcinoma (SCC). In some embodiments, which may be combined with any of the preceding aspects or embodiments, the ALK fusion nucleic acid molecule is an ALK fusion nucleic acid molecule listed in Table 9, or the encoded ALK fusion polypeptide is an ALK fusion polypeptide listed in Table 9, and wherein the cancer is the corresponding cancer as listed in Table 9.

[0068] In some embodiments, which may be combined with any of the preceding aspects or embodiments, the plurality of sequence reads is obtained by sequencing; optionally wherein the sequencing comprises use of a massively parallel sequencing (MPS) technique, whole genome sequencing (WGS), whole exome sequencing, targeted sequencing, direct sequencing, or a Sanger sequencing technique; and optionally wherein the massively parallel sequencing technique comprises next generation sequencing (NGS).

[0069] In some embodiments, which may be combined with any of the preceding aspects or embodiments, the one or more program instructions when executed by the one or more processors are further configured to generate, based at least in part on the detecting, a molecular profile for the sample. In some embodiments, which may be combined with any of the preceding aspects or embodiments, the method further comprises generating, based at least in part on the detecting, a molecular profile for the sample. In some embodiments, the individual is administered a treatment based at least in part on the molecular profile. In some embodiments, the treatment comprises an ALK-targeted therapy. In some embodiments, the molecular profile further comprises results from a comprehensive genomic profiling (CGP) test, a gene expression profiling test, a cancer hotspot panel test, a DNA methylation test, a DNA fragmentation test, an RNA fragmentation test, or any combination thereof. In some embodiments, the molecular profile further comprises results from a nucleic acid sequencing-based test.

[0070] In another aspect, provided herein is an ALK-targeted therapy for use in a method of treating or delaying progression of cancer, wherein the method comprises administering the ALK-targeted therapy to an individual, wherein: (a) an ALK fusion nucleic acid molecule comprising a fusion between an ALK gene, or a portion thereof, and a gene listed in Table 1, or a portion thereof, or (b) an ALK fusion polypeptide encoded by the ALK fusion nucleic acid molecule, is detected in a sample obtained from the individual. In another aspect, provided herein is an ALK-targeted therapy for use in a method of treating or delaying progression of cancer, wherein the method comprises administering the ALK-targeted therapy to an individual, wherein: (a) an ALK fusion nucleic acid molecule provided herein, or a portion thereof, or (b) an ALK fusion polypeptide provided herein, or a portion thereof, is detected in a sample obtained from the individual.

[0071] In another aspect, provided herein is an ALK-targeted therapy for use in the manufacture of a medicament for treating or delaying progression of cancer, wherein the medicament is to be administered to an individual, wherein: (a) an ALK fusion nucleic acid molecule comprising a fusion between an ALK gene, or a portion thereof, and a gene listed in Table 1, or a portion thereof, or (b) an ALK fusion polypeptide encoded by the ALK fusion nucleic acid molecule, is detected in a sample obtained from the individual. In another aspect, provided herein is an ALK-targeted therapy for use in the manufacture of a medicament for treating or delaying progression of cancer, wherein the medicament is to be administered to an individual, wherein: (a) an ALK fusion nucleic acid molecule provided herein, or a portion thereof, or (b) an ALK fusion polypeptide provided herein, or a portion thereof, is detected in a sample obtained from the individual.

[0072] It is to be understood that one, some, or all of the properties of the various embodiments described herein may be combined to form other embodiments of the present invention. These and other aspects of the invention will become apparent to one of skill in the art. These and other embodiments of the invention are further described by the detailed description that follows.

### BRIEF DESCRIPTION OF THE DRAWINGS

[0073] FIG. 1 depicts an exemplary device, in accordance with some embodiments.

[0074] FIG. 2 depicts an exemplary system, in accordance with some embodiments.

[0075] FIG. 3 depicts a block diagram of an exemplary process for detecting an ALK fusion nucleic acid molecule, in accordance with some embodiments.

### DETAILED DESCRIPTION

[0076] The present disclosure relates generally to detecting ALK kinase fusions in cancer, as well as methods of treatment, and uses related thereto.

[0077] Kinase fusions are an important class of targetable oncogenic driver variants. The present disclosure describes the results of comprehensive genomic profiling of the pan-cancer landscape of ALK gene fusions. These analyses identified diverse rearrangements leading to fusion genes involving ALK and numerous fusion partner genes (see, e.g., Example 1). Without wishing to be bound by theory, it is thought that the presence of an ALK fusion described herein in a sample from individuals having cancer may identify cancer patients who are likely to respond to treatment with an anti-cancer therapy such as a targeted anti-cancer therapy, e.g., an ALK-targeted therapy as described herein.

### I. General Techniques

[0078] The techniques and procedures described or referenced herein are generally well understood and commonly employed using conventional methodology by those skilled in the art, such as, for example, the widely utilized methodologies described in Sambrook et al., Molecular Cloning: A Laboratory Manual 3d edition (2001) Cold Spring Harbor Laboratory Press, Cold Spring Harbor, N.Y.; Current Protocols in Molecular Biology (F. M. Ausubel, et al. eds., (2003)); the series Methods in Enzymology (Academic Press, Inc.): PCR 2: A Practical Approach (M. J. MacPherson, B. D. Hames and G. R. Taylor eds. (1995)), Harlow and Lane, eds. (1988) Antibodies, A Laboratory Manual, and Animal Cell Culture (R. I. Freshney, ed. (1987)); Oligonucleotide Synthesis (M. J. Gait, ed., 1984); Methods in Molecular Biology, Humana Press; Cell Biology: A Laboratory Notebook (J. E. Cellis, ed., 1998) Academic Press; Animal Cell Culture (R. I. Freshney), ed., 1987); Introduction to Cell and Tissue Culture (J. P. Mather and P. E. Roberts, 1998) Plenum Press; Cell and Tissue Culture: Laboratory Procedures (A. Doyle, J. B. Griffiths, and D. G. Newell, eds., 1993-8) J. Wiley and Sons; Handbook of Experimental Immunology (D. M. Weir and C. C. Blackwell, eds.); Gene Transfer Vectors for Mammalian Cells (J. M. Miller and M. P. Calos, eds., 1987); PCR: The Polymerase Chain Reaction, (Mullis et al., eds., 1994); Current Protocols in Immunology (J. E. Coligan et al., eds., 1991); Short Protocols in Molecular Biology (Wiley and Sons, 1999); Immunobiology (C. A. Janeway and P. Travers, 1997); Antibodies (P. Finch, 1997); Antibodies: A Practical Approach (D. Catty., ed., IRL Press, 1988-1989); Monoclonal Antibodies: A Practical Approach (P. Shepherd and C. Dean, eds., Oxford University Press, 2000); Using Antibodies: A Laboratory Manual (E. Harlow and D. Lane (Cold Spring Harbor Laboratory Press, 1999); The Antibodies (M. Zanetti and J. D. Capra, eds., Harwood Academic Publishers, 1995); and Cancer: Principles and Practice of Oncology (V. T. DeVita et al., eds., J. B. Lippincott Company, 1993).

### II. Definitions

[0079] As used in this specification and the appended claims, the singular forms “a”, “an” and “the” include plural referents unless the context clearly dictates otherwise. Thus, for example, reference to “a molecule” optionally includes a combination of two or more such molecules, and the like.

[0080] The term “about” as used herein refers to the usual error range for the respective value readily known to the skilled person in this technical field. Reference to “about” a value or parameter herein includes (and describes) embodiments that are directed to that value or parameter per se.

[0081] It is understood that aspects and embodiments of the invention described herein include “comprising,” “consisting,” and “consisting essentially of” aspects and embodiments.

[0082] The terms “cancer” and “cancerous” refer to or describe the physiological condition in mammals that is typically characterized by unregulated cell growth. Included in this definition are benign and malignant cancers.

[0083] The term “tumor,” as used herein, refers to all neoplastic cell growth and proliferation, whether malignant or benign, and all pre-cancerous and cancerous cells and tissues. The terms “cancer,” “cancerous,” and “tumor” are not mutually exclusive as referred to herein.

[0084] “Polynucleotide,” “nucleic acid,” or “nucleic acid molecule” as used interchangeably herein, refer to polymers of nucleotides of any length, and include DNA and RNA. The nucleotides can be deoxyribonucleotides, ribonucleotides, modified nucleotides or bases, and/or their analogs, or any substrate that can be incorporated into a polymer by DNA or RNA polymerase, or by a synthetic reaction. Thus, for instance, polynucleotides as defined herein include, without limitation, single- and double-stranded DNA, DNA including single- and double-stranded regions, single- and double-stranded RNA, and RNA including single- and double-stranded regions, hybrid molecules comprising DNA and RNA that may be single-stranded or, more typically, double-stranded or include single- and double-stranded regions. In addition, the term “polynucleotide” as used herein refers to triple-stranded regions comprising RNA or DNA or both RNA and DNA. The strands in such regions may be from the same molecule or from different molecules. The regions may include all of one or more of the molecules, but more typically involve only a region of some of the molecules. One of the molecules of a triple-helical region often is an oligonucleotide. The term “polynucleotide” specifically includes cDNAs.

[0085] A polynucleotide may comprise modified nucleotides, such as methylated nucleotides and their analogs. If present, modification to the nucleotide structure may be imparted before or after assembly of the polymer. The sequence of nucleotides may be interrupted by non-nucleotide components. A polynucleotide may be further modified after synthesis, such as by conjugation with a label. Other types of modifications include, for example, “caps,” substitution of one or more of the naturally-occurring nucleotides with an analog, internucleotide modifications such as, for example, those with uncharged linkages (e.g., methyl phosphonates, phosphotriesters, phosphoamidates, carbamates, and the like) and with charged linkages (e.g., phosphorothioates, phosphorodithioates, and the like), those containing pendant moieties, such as, for example, proteins (e.g., nucleases, toxins, antibodies, signal peptides, poly-L-lysine, and the like), those with intercalators (e.g., acridine, psoralen, and the like), those containing chelators (e.g., metals, radioactive metals, boron, oxidative metals, and the like), those containing alkylators, those with modified linkages (e.g., alpha anomeric nucleic acids), as well as unmodified forms of the polynucleotide(s). Further, any of the hydroxyl groups ordinarily present in the sugars may be replaced, for example, by phosphonate groups, phosphate groups, protected by standard protecting groups, or activated to prepare additional linkages to additional nucleotides, or may be conjugated to solid or semi-solid supports. The 5′ and 3′ terminal OH can be phosphorylated or substituted with amines or organic capping group moieties of from 1 to 20 carbon atoms. Other hydroxyls may also be derivatized to standard protecting groups. Polynucleotides can also contain analogous forms of ribose or deoxyribose sugars that are generally known in the art, including, for example, 2-0-methyl-, 2-0-allyl-, 2′-fluoro-, or 2′-azido-ribose, carbocyclic sugar analogs, a-anomeric sugars, epimeric sugars such as arabinose, xyloses or lyxoses, pyranose sugars, furanose sugars, sedoheptuloses, acyclic analogs, and abasic nucleoside analogs such as methyl riboside. One or more phosphodiester linkages may be replaced by alternative linking groups. These alternative linking groups include, but are not limited to, embodiments wherein phosphate is replaced by P(0)S (“thioate”), P(S)S (“dithioate”), “(0)NR₂ (“amidate”), P(0)R, P(0)OR′, CO or CH₂ (“formacetal”), in which each R or R′ is independently H or substituted or unsubstituted alkyl (1-20 C) optionally containing an ether (-0-) linkage, aryl, alkenyl, cycloalkyl, cycloalkenyl or araldyl. Not all linkages in a polynucleotide need be identical. A polynucleotide can contain one or more different types of modifications as described herein and/or multiple modifications of the same type. The preceding description applies to all polynucleotides referred to herein, including RNA and DNA.

[0086] “Oligonucleotide,” as used herein, generally refers to short, single stranded, polynucleotides that are, but not necessarily, less than about 250 nucleotides in length. Oligonucleotides may be synthetic. The terms “oligonucleotide” and “polynucleotide” are not mutually exclusive. The description above for polynucleotides is equally and fully applicable to oligonucleotides.

[0087] The term “antibody” herein is used in the broadest sense and encompasses various antibody structures, including but not limited to monoclonal antibodies, polyclonal antibodies, multispecific antibodies (e.g., bispecific antibodies), and antibody fragments so long as they exhibit the desired antigen-binding activity.

[0088] An “isolated” antibody is one which has been identified and separated and/or recovered from a component of its natural environment. Contaminant components of its natural environment are materials which would interfere with research, diagnostic, and/or therapeutic uses for the antibody, and may include enzymes, hormones, and other proteinaceous or nonproteinaceous solutes. In some embodiments, an antibody is purified (1) to greater than 95% by weight of antibody as determined by, for example, the Lowry method, and in some embodiments, to greater than 99% by weight; (2) to a degree sufficient to obtain at least 15 residues of N-terminal or internal amino acid sequence by use of, for example, a spinning cup sequenator, or (3) to homogeneity by SDS-PAGE under reducing or nonreducing conditions using, for example, Coomassie blue or silver stain. An isolated antibody includes the antibody in situ within recombinant cells since at least one component of the antibody's natural environment will not be present. Ordinarily, however, an isolated antibody will be prepared by at least one purification step.

[0089] “Native antibodies” are usually heterotetrameric glycoproteins of about 150,000 daltons, composed of two identical light (L) chains and two identical heavy (H) chains. Each light chain is linked to a heavy chain by one covalent disulfide bond, while the number of disulfide linkages varies among the heavy chains of different immunoglobulin isotypes. Each heavy and light chain also has regularly spaced intrachain disulfide bridges. Each heavy chain has at one end a variable domain (VH) followed by a number of constant domains. Each light chain has a variable domain at one end (VL) and a constant domain at its other end; the constant domain of the light chain is aligned with the first constant domain of the heavy chain, and the light chain variable domain is aligned with the variable domain of the heavy chain. Particular amino acid residues are believed to form an interface between the light chain and heavy chain variable domains.

[0090] The “light chains” of antibodies (immunoglobulins) from any mammalian species can be assigned to one of two clearly distinct types, called kappa (“K”) and lambda (“X”), based on the amino acid sequences of their constant domains.

[0091] The term “constant domain” refers to the portion of an immunoglobulin molecule having a more conserved amino acid sequence relative to the other portion of the immunoglobulin, the variable domain, which contains the antigen binding site. The constant domain contains the CH1, CH2, and CH3 domains (collectively, CH) of the heavy chain and the CHL (or CL) domain of the light chain.

[0092] The “variable region” or “variable domain” of an antibody refers to the amino-terminal domains of the heavy or light chain of the antibody. The variable domain of the heavy chain may be referred to as “VH.” The variable domain of the light chain may be referred to as “VL.” These domains are generally the most variable parts of an antibody and contain the antigen-binding sites.

[0093] The term “variable” refers to the fact that certain portions of the variable domains differ extensively in sequence among antibodies and are used in the binding and specificity of each particular antibody for its particular antigen. However, the variability is not evenly distributed throughout the variable domains of antibodies. It is concentrated in three segments called hypervariable regions (HVRs) both in the light chain and the heavy chain variable domains. The more highly conserved portions of variable domains are called the framework regions (FR). The variable domains of native heavy and light chains each comprise four FR regions, largely adopting a beta-sheet configuration, connected by three HVRs, which form loops connecting, and in some cases forming part of, the beta-sheet structure. The HVRs in each chain are held together in close proximity by the FR regions and, with the HVRs from the other chain, contribute to the formation of the antigen-binding site of antibodies (see Kabat et al., Sequences of Proteins of Immunological Interest, Fifth Edition, National Institute of Health, Bethesda, Md. (1991)). The constant domains are not involved directly in the binding of an antibody to an antigen, but exhibit various effector functions, such as participation of the antibody in antibody-dependent cellular toxicity.

[0094] The term “hypervariable region,” “HVR,” or “HV,” as used herein, refers to the regions of an antibody variable domain which are hypervariable in sequence and/or form structurally defined loops. Generally, antibodies comprise six HVRs; three in the VH (H1, H2, H3), and three in the VL (L1, L2, L3). In native antibodies, H3 and L3 display the most diversity of the six HVRs, and H3 in particular is believed to play a unique role in conferring fine specificity to antibodies. See, for example, Xu et al., Immunity 13:37-45 (2000); Johnson and Wu, in Methods in Molecular Biology 248:1-25 (Lo, ed., Human Press, Totowa, N.J., 2003). Indeed, naturally occurring camelid antibodies consisting of a heavy chain only are functional and stable in the absence of light chain. See, for example, Hamers-Casterman et al., Nature 363:446-448 (1993); Sheriff et al., Nature Struct. Biol. 3:733-736 (1996).

[0095] A number of HVR delineations are in use and are encompassed herein. The Kabat Complementarity Determining Regions (CDRs) are based on sequence variability and are the most commonly used (Kabat et al., Sequences of Proteins of Immunological Interest, 5th Ed. Public Health Service, National Institutes of Health, Bethesda, Md. (1991)). Chothia refers instead to the location of the structural loops (Chothia and Lesk J. Mol. Biol. 196:901-917 (1987)). The AbM HVRs represent a compromise between the Kabat HVRs and Chothia structural loops, and are used by Oxford Molecular's AbM antibody modeling software. The “contact” HVRs are based on an analysis of the available complex crystal structures. The residues from each of these HVRs are noted below.

| Loop | Kabat | AbM | Chothia | Contact |
|---|---|---|---|---|
| L1 | L24-L34 | L24-L34 | L26-L32 | L30-L36 |
| L2 | L50-L56 | L50-L56 | L50-L52 | L46-L55 |
| L3 | L89-L97 | L89-L97 | L91-L96 | L89-L96 |
| H1 | H31-H35B | H26-H35B | H26-H32 | H30-H35B |
| | | | | (Kabat numbering) |
| H1 | H31-H35 | H26-H35 | H26-H32 | H30-H35 |
| | | | | (Chothia numbering) |
| H2 | H50-H65 | H50-H58 | H53-H55 | H47-H58 |
| H3 | H95-H102 | H95-H102 | H96-H101 | H93-H101 |

[0096] HVRs may comprise “extended HVRs” as follows: 24-36 or 24-34 (L1), 46-56 or 50-56 (L2) and 89-97 or 89-96 (L3) in the VL and 26-35 (H1), 50-65 or 49-65 (H2) and 93-102, 94-102, or 95-102 (H3) in the VH. The variable domain residues are numbered according to Kabat et al., supra, for each of these definitions.

[0097] “Framework” or “FR” residues are those variable domain residues other than the HVR residues as herein defined.

[0098] The term “variable domain residue numbering as in Kabat” or “amino acid position numbering as in Kabat,” and variations thereof, refers to the numbering system used for heavy chain variable domains or light chain variable domains of the compilation of antibodies in Kabat et al., supra. Using this numbering system, the actual linear amino acid sequence may contain fewer or additional amino acids corresponding to a shortening of, or insertion into, a FR or HVR of the variable domain. For example, a heavy chain variable domain may include a single amino acid insert (residue 52a according to Kabat) after residue 52 of H2 and inserted residues (e.g., residues 82a, 82b, and 82c, etc. according to Kabat) after heavy chain FR residue 82. The Kabat numbering of residues may be determined for a given antibody by alignment at regions of homology of the sequence of the antibody with a “standard” Kabat numbered sequence.

[0099] The Kabat numbering system is generally used when referring to a residue in the variable domain (approximately residues 1-107 of the light chain and residues 1-1 13 of the heavy chain) (e.g., Kabat et al., Sequences of Immunological Interest. 5th Ed. Public Health Service, National Institutes of Health, Bethesda, Md. (1991)). The “EU numbering system” or “EU index” is generally used when referring to a residue in an immunoglobulin heavy chain constant region (e.g., the EU index reported in Kabat et al., supra). The “EU index as in Kabat” refers to the residue numbering of the human lgG1 EU antibody.

[0100] The terms “full-length antibody,” “intact antibody,” and “whole antibody” are used herein interchangeably to refer to an antibody in its substantially intact form, not antibody fragments as defined below. The terms particularly refer to an antibody with heavy chains that contain an Fc region.

[0101] “Antibody fragments” comprise a portion of an intact antibody comprising the antigen-binding region thereof. In some embodiments, the antibody fragment described herein is an antigen-binding fragment. Examples of antibody fragments include Fab, Fab′, F(ab′)₂, and Fv fragments; diabodies; linear antibodies; single-chain antibody molecules; and multispecific antibodies formed from antibody fragments.

[0102] The term “monoclonal antibody” as used herein refers to an antibody obtained from a population of substantially homogeneous antibodies, e.g., the individual antibodies comprising the population are identical except for possible mutations, e.g., naturally occurring mutations, that may be present in minor amounts. Thus, the modifier “monoclonal” indicates the character of the antibody as not being a mixture of discrete antibodies. In certain embodiments, such a monoclonal antibody typically includes an antibody comprising a polypeptide sequence that binds a target, wherein the target-binding polypeptide sequence was obtained by a process that includes the selection of a single target-binding polypeptide sequence from a plurality of polypeptide sequences. For example, the selection process can be the selection of a unique clone from a plurality of clones, such as a pool of hybridoma clones, phage clones, or recombinant DNA clones. It should be understood that a selected target-binding sequence can be further altered, for example, to improve affinity for the target, to humanize the target-binding sequence, to improve its production in cell culture, to reduce its immunogenicity in vivo, to create a multispecific antibody, etc., and that an antibody comprising the altered target-binding sequence is also a monoclonal antibody of this invention. In contrast to polyclonal antibody preparations, which typically include different antibodies directed against different determinants (epitopes), each monoclonal antibody of a monoclonal antibody preparation is directed against a single determinant on an antigen. In addition to their specificity, monoclonal antibody preparations are advantageous in that they are typically uncontaminated by other immunoglobulins.

[0103] The modifier “monoclonal” indicates the character of the antibody as being obtained from a substantially homogeneous population of antibodies, and is not to be construed as requiring production of the antibody by any particular method. For example, the monoclonal antibodies to be used in accordance with the invention may be made by a variety of techniques, including, for example, the hybridoma method (e.g., Kohler and Milstein, Nature 256:495-97 (1975); Hongo et al., Hybridoma 14 (3): 253-260 (1995), Harlow et al., Antibodies: A Laboratory Manual (Cold Spring Harbor Laboratory Press, 2nd ed. 1988); Hammerling et al., in: Monoclonal Antibodies and T-Cell Hybridomas 563-681 (Elsevier, N.Y., 1981)), recombinant DNA methods (see, e.g., U.S. Pat. No. 4,816,567), phage-display technologies (see, e.g., Clackson et al., Nature, 352: 624-628 (1991); Marks et al., J. Mol. Biol. 222: 581-597 (1992); Sidhu et al., J. Mol. Biol. 338(2): 299-31 0 (2004); Lee et al., J. Mol. Biol. 340(5): 1073-1093 (2004); Fellouse, Proc. Natl. Acad. Sci. USA 101 (34): 12467-12472 (2004); and Lee et al., J. Immunol. Methods 284(1-2): 11 9-132 (2004)), and technologies for producing human or human-like antibodies in animals that have parts or all of the human immunoglobulin loci or genes encoding human immunoglobulin sequences (see, e.g., WO 1998/24893; WO 1996/34096; WO 1996/33735; WO 1991/10741; Jakobovits et al., Proc. Natl. Acad. Sci. USA 90: 2551 (1993); Jakobovits et al., Nature 362: 255-258 (1993); Bruggemann et al., Year in Immunol. 7:33 (1993); U.S. Pat. Nos. 5,545,807; 5,545,806; 5,569,825; 5,625,126; 5,633,425; and U.S. Pat. No. 5,661,016; Marks et al., Bio/Technology 10: 779-783 (1992); Lonberg et al., Nature 368: 856-859 (1994); Morrison, Nature 368: 812-813 (1994); Fishwild et al., Nature Biotechnol. 14: 845-851 (1996); Neuberger, Nature Biotechnol. 14: 826 (1996); and Lonberg et al., Intern. Rev. Immunol. 13: 65-93 (1995)).

[0104] A “human antibody” is one which possesses an amino acid sequence which corresponds to that of an antibody produced by a human or a human cell or derived from a non-human source that utilizes human antibody repertoires or other human antibody-encoding sequences. This definition of a human antibody specifically excludes a humanized antibody comprising non-human antigen-binding residues.

[0105] A “humanized” antibody refers to a chimeric antibody comprising amino acid residues from non-human HVRs and amino acid residues from human framework regions (FRs). In certain embodiments, a humanized antibody will comprise substantially all of at least one, and typically two, variable domains, in which all or substantially all of the HVRs (e.g., CDRs) correspond to those of a non-human antibody, and all or substantially all of the FRs correspond to those of a human antibody.

[0106] A humanized antibody optionally may comprise at least a portion of an antibody constant region derived from a human antibody.

[0107] A “humanized form” of an antibody, e.g., a non-human antibody, refers to an antibody that has undergone humanization.

[0108] A “blocking” antibody or an “antagonist” antibody is one which inhibits or reduces biological activity of the antigen it binds. For example, blocking antibodies or antagonist antibodies substantially or completely inhibit the biological activity of the antigen.

[0109] As used herein, the term “binds”, “specifically binds to” or is “specific for” refers to measurable and reproducible interactions such as binding between a target and an antibody, which is determinative of the presence of the target in the presence of a heterogeneous population of molecules including biological molecules. For example, an antibody that binds to or specifically binds to a target (which can be an epitope) is an antibody that binds this target with greater affinity, avidity, more readily, and/or with greater duration than it binds to other targets. In one embodiment, the extent of binding of an antibody to an unrelated target is less than about 10% of the binding of the antibody to the target as measured, e.g., by a radioimmunoassay (RIA). In certain embodiments, an antibody that specifically binds to a target has a dissociation constant (Kd) of <1 μM, <100 nM, <10 nM, <1 nM, or <0.1 nM. In certain embodiments, an antibody specifically binds to an epitope on a protein that is conserved among the protein from different species. In another embodiment, specific binding can include, but does not require exclusive binding.

[0110] “Percent (%) amino acid sequence identity” or “homology” with respect to the polypeptide sequences identified herein is defined as the percentage of amino acid residues in a candidate sequence that are identical with the amino acid residues in the polypeptide being compared, after aligning the sequences and introducing gaps, if necessary, to achieve the maximum percent sequence identity, and not considering any conservative substitutions as part of the sequence identity. Alignment for purposes of determining percent amino acid sequence identity can be achieved in various ways that are within the skill in the art, for instance, using publicly available computer software such as BLAST, BLAST-2, ALIGN, ALIGN-2, or Megalign (DNASTAR) software. Those skilled in the art can determine appropriate parameters for measuring alignment, including any algorithms needed to achieve maximal alignment over the full-length of the sequences being compared.

[0111] The term “detection” includes any means of detecting, including direct and indirect detection. The term “biomarker” as used herein (e.g., a “biomarker” such as a kinase fusion or a fusion nucleic acid molecule or polypeptide described herein) refers to an indicator, e.g., predictive, diagnostic, and/or prognostic, which can be detected in a sample. The biomarker may serve as an indicator of a particular subtype of a disease or disorder (e.g., cancer) characterized by certain, molecular, pathological, histological, and/or clinical features (e.g., responsiveness to therapy including a checkpoint inhibitor). In some embodiments, a biomarker is a collection of genes or a collective number of mutations/alterations (e.g., somatic mutations) in a collection of genes. Biomarkers include, but are not limited to, polynucleotides (e.g., DNA and/or RNA), polynucleotide alterations (e.g., polynucleotide copy number alterations, e.g., DNA copy number alterations), polypeptides, polypeptide and polynucleotide modifications (e.g., post-translational modifications), carbohydrates, and/or glycolipid-based molecular markers.

[0112] “Amplification,” as used herein generally refers to the process of producing multiple copies of a desired sequence. “Multiple copies” mean at least two copies. A “copy” does not necessarily mean perfect sequence complementarity or identity to the template sequence. For example, copies can include nucleotide analogs such as deoxyinosine, intentional sequence alterations (such as sequence alterations introduced through a primer comprising a sequence that is hybridizable, but not complementary, to the template), and/or sequence errors that occur during amplification.

[0113] The technique of “polymerase chain reaction” or “PCR” as used herein generally refers to a procedure wherein minute amounts of a specific piece of nucleic acid, RNA and/or DNA, are amplified as described, for example, in U.S. Pat. No. 4,683,195. Generally, sequence information from the ends of the region of interest or beyond needs to be available, such that oligonucleotide primers can be designed; these primers will be identical or similar in sequence to opposite strands of the template to be amplified. The 5′ terminal nucleotides of the two primers may coincide with the ends of the amplified material. PCR can be used to amplify specific RNA sequences, specific DNA sequences from total genomic DNA, and cDNA transcribed from total cellular RNA, bacteriophage, or plasmid sequences, etc. See generally Mullis et al., Cold Spring Harbor Symp. Quant. Biol. 51:263 (1987) and Erlich, ed., PCR Technology (Stockton Press, NY, 1989). As used herein, PCR is considered to be one, but not the only, example of a nucleic acid polymerase reaction method for amplifying a nucleic acid test sample, comprising the use of a known nucleic acid (DNA or RNA) as a primer and utilizes a nucleic acid polymerase to amplify or generate a specific piece of nucleic acid or to amplify or generate a specific piece of nucleic acid which is complementary to a particular nucleic acid.

[0114] The term “diagnosis” is used herein to refer to the identification or classification of a molecular or pathological state, disease or condition (e.g., cancer). For example, “diagnosis” may refer to identification of a particular type of cancer. “Diagnosis” may also refer to the classification of a particular subtype of cancer, for instance, by histopathological criteria, or by molecular features (e.g., a subtype characterized by expression of one or a combination of biomarkers (e.g., particular genes or proteins encoded by said genes)).

[0115] The term “aiding diagnosis” is used herein to refer to methods that assist in making a clinical determination regarding the presence, or nature, of a particular type of symptom or condition of a disease or disorder (e.g., cancer). For example, a method of aiding diagnosis of a disease or condition (e.g., cancer) can comprise measuring certain somatic mutations in a biological sample from an individual.

[0116] The term “sample,” as used herein, refers to a composition that is obtained or derived from a subject and/or individual of interest that contains a cellular and/or other molecular entity that is to be characterized and/or identified, for example, based on physical, biochemical, chemical, and/or physiological characteristics. For example, the phrase “disease sample” and variations thereof refers to any sample obtained from a subject of interest that would be expected or is known to contain the cellular and/or molecular entity that is to be characterized. Samples include, but are not limited to, tissue samples, primary or cultured cells or cell lines, cell supernatants, cell lysates, platelets, serum, plasma, vitreous fluid, lymph fluid, synovial fluid, follicular fluid, seminal fluid, amniotic fluid, milk, whole blood, plasma, serum, blood-derived cells, urine, cerebro-spinal fluid, saliva, sputum, tears, perspiration, mucus, tumor lysates, and tissue culture medium, tissue extracts such as homogenized tissue, tumor tissue, cellular extracts, and combinations thereof. In some instances, the sample is a whole blood sample, a plasma sample, a serum sample, or a combination thereof. In some embodiments, the sample is from a tumor (e.g., a “tumor sample”), such as from a biopsy. In some embodiments, the sample is a formalin-fixed paraffin-embedded (FFPE) sample.

[0117] A “tumor cell” as used herein, refers to any tumor cell present in a tumor or a sample thereof. Tumor cells may be distinguished from other cells that may be present in a tumor sample, for example, stromal cells and tumor-infiltrating immune cells, using methods known in the art and/or described herein.

[0118] A “reference sample,” “reference cell,” “reference tissue,” “control sample,” “control cell,” or “control tissue,” as used herein, refer to a sample, cell, tissue, standard, or level that is used for comparison purposes.

[0119] By “correlate” or “correlating” is meant comparing, in any way, the performance and/or results of a first analysis or protocol with the performance and/or results of a second analysis or protocol. For example, one may use the results of a first analysis or protocol in carrying out a second protocol and/or one may use the results of a first analysis or protocol to determine whether a second analysis or protocol should be performed. With respect to the embodiment of polypeptide analysis or protocol, one may use the results of the polypeptide expression analysis or protocol to determine whether a specific therapeutic regimen should be performed. With respect to the embodiment of polynucleotide analysis or protocol, one may use the results of the polynucleotide expression analysis or protocol to determine whether a specific therapeutic regimen should be performed.

[0120] “Individual response” or “response” can be assessed using any endpoint indicating a benefit to the individual, including, without limitation, (1) inhibition, to some extent, of disease progression (e.g., cancer progression), including slowing down or complete arrest; (2) a reduction in tumor size; (3) inhibition (i.e., reduction, slowing down, or complete stopping) of cancer cell infiltration into adjacent peripheral organs and/or tissues; (4) inhibition (i.e. reduction, slowing down, or complete stopping) of metastasis; (5) relief, to some extent, of one or more symptoms associated with the disease or disorder (e.g., cancer); (6) increase or extension in the length of survival, including overall survival and progression free survival; and/or (7) decreased mortality at a given point of time following treatment.

[0121] An “effective response” of a patient or a patient's “responsiveness” to treatment with a medicament and similar wording refers to the clinical or therapeutic benefit imparted to a patient at risk for, or suffering from, a disease or disorder, such as cancer. In one embodiment, such benefit includes any one or more of: extending survival (including overall survival and/or progression-free survival); resulting in an objective response (including a complete response or a partial response); or improving signs or symptoms of cancer.

[0122] An “effective amount” refers to an amount of a therapeutic agent to treat or prevent a disease or disorder in a mammal. In the case of cancers, the therapeutically effective amount of the therapeutic agent may reduce the number of cancer cells; reduce the primary tumor size; inhibit (i.e., slow to some extent and in some embodiments stop) cancer cell infiltration into peripheral organs; inhibit (i.e., slow to some extent and in some embodiments stop) tumor metastasis; inhibit, to some extent, tumor growth; and/or relieve to some extent one or more of the symptoms associated with the disorder. To the extent the drug may prevent growth and/or kill existing cancer cells, it may be cytostatic and/or cytotoxic. For cancer therapy, efficacy in vivo can, for example, be measured by assessing the duration of survival, time to disease progression (TTP), response rates (e.g., CR and PR), duration of response, and/or quality of life.

[0123] The term “pharmaceutical formulation” refers to a preparation which is in such form as to permit the biological activity of an active ingredient contained therein to be effective, and which contains no additional components which are unacceptably toxic to a subject to which the formulation would be administered.

[0124] A “pharmaceutically acceptable carrier” refers to an ingredient in a pharmaceutical formulation, other than an active ingredient, which is nontoxic to a subject. A pharmaceutically acceptable carrier includes, but is not limited to, a buffer, excipient, stabilizer, or preservative.

[0125] As used herein, “treatment” (and grammatical variations thereof such as “treat” or “treating”) refers to clinical intervention in an attempt to alter the natural course of the individual being treated, and can be performed either for prophylaxis or during the course of clinical pathology. Desirable effects of treatment include, but are not limited to, preventing occurrence or recurrence of disease, alleviation of symptoms, diminishment of any direct or indirect pathological consequences of the disease, preventing metastasis, decreasing the rate of disease progression, amelioration or palliation of the disease state, and remission or improved prognosis.

[0126] As used herein, the terms “individual,” “patient,” or “subject” are used interchangeably and refer to any single animal, e.g., a mammal (including such non-human animals as, for example, dogs, cats, horses, rabbits, zoo animals, cows, pigs, sheep, and non-human primates) for which treatment is desired. In particular embodiments, the patient herein is a human.

[0127] As used herein, “administering” is meant a method of giving a dosage of an agent or a pharmaceutical composition (e.g., a pharmaceutical composition including the agent) to a subject (e.g., a patient). Administering can be by any suitable means, including parenteral, intrapulmonary, and intranasal, and, if desired for local treatment, intralesional administration. Parenteral infusions include, for example, intramuscular, intravenous, intraarterial, intraperitoneal, or subcutaneous administration. Dosing can be by any suitable route, e.g., by injections, such as intravenous or subcutaneous injections, depending in part on whether the administration is brief or chronic. Various dosing schedules including but not limited to single or multiple administrations over various time-points, bolus administration, and pulse infusion are contemplated herein.

[0128] The term “concurrently” is used herein to refer to administration of two or more therapeutic agents, where at least part of the administration overlaps in time. Accordingly, concurrent administration includes a dosing regimen when the administration of one or more agent(s) continues after discontinuing the administration of one or more other agent(s).

[0129] The term “package insert” is used to refer to instructions customarily included in commercial packages of therapeutic products, that contain information about the indications, usage, dosage, administration, combination therapy, contraindications, and/or warnings concerning the use of such therapeutic products.

[0130] An “article of manufacture” is any manufacture (e.g., a package or container) or kit comprising at least one reagent, e.g., a medicament for treatment of a disease or disorder (e.g., cancer), or a reagent for specifically detecting a biomarker (e.g., a kinase fusion or a fusion nucleic acid molecule or polypeptide described herein) described herein. In certain embodiments, the manufacture or kit is promoted, distributed, or sold as a unit for performing the methods described herein.

[0131] The phrase “based on” when used herein means that the information about one or more biomarkers (e.g., a kinase fusion or a fusion nucleic acid molecule or polypeptide described herein) is used to inform a treatment decision, information provided on a package insert, or marketing/promotional guidance, etc.

### III. Methods, Systems, and Devices

[0132] In some aspects, provided herein are methods for identifying an individual having a cancer who may benefit from a treatment comprising an anaplastic lymphoma kinase (ALK)-targeted therapy. In other aspects, provided herein are methods for selecting a therapy or treatment for an individual having a cancer. In other aspects, provided herein are methods for identifying one or more treatment options for an individual having a cancer. In other aspects, provided herein are methods for predicting survival of an individual having a cancer. In other aspects, provided herein are methods for predicting survival of an individual having a cancer treated with a treatment comprising an ALK-targeted therapy. In other aspects, provided herein are methods for treating or delaying progression of cancer. In other aspects, provided herein are methods for monitoring, evaluating or screening an individual having a cancer. In other aspects, provided herein are methods for assessing an ALK fusion nucleic acid molecule or polypeptide in a cancer in an individual. In other aspects, provided herein are methods for detecting an ALK fusion nucleic acid molecule or polypeptide in a sample from an individual having a cancer. In other aspects, provided herein are methods for detecting the presence or absence of a cancer and/or an ALK fusion nucleic acid molecule or polypeptide in an individual.

[0133] In some embodiments of any of the methods provided herein, the methods comprise detecting the presence or absence of an ALK fusion nucleic acid molecule provided herein, or a fragment thereof, in a sample from an individual. In other embodiments of any of the methods provided herein, the methods comprise detecting the presence or absence of an ALK fusion polypeptide provided herein, or a fragment thereof, in a sample from an individual. In other embodiments of any of the methods provided herein, the methods comprise acquiring knowledge of the presence or absence of an ALK fusion polypeptide provided herein, or a fragment thereof, in a sample from an individual. In other embodiments of any of the methods provided herein, the methods comprise acquiring knowledge of the presence or absence of an ALK fusion nucleic acid molecule provided herein, or a fragment thereof, in a sample from an individual. In some embodiments, detection of an ALK fusion nucleic acid molecule or polypeptide of the disclosure, or a fragment thereof, in the sample identifies the individual as one who may benefit from the treatment comprising an ALK-targeted therapy. In some embodiments, the methods further comprise generating a report comprising one or more treatment options identified for the individual based at least in part on detection of the ALK fusion nucleic acid molecule or polypeptide, or a fragment thereof, in the sample, wherein the one or more treatment options comprise an ALK-targeted therapy. In some embodiments, the methods further comprise generating a report comprising one or more treatment options identified for the individual based at least in part on knowledge of the presence of the ALK fusion nucleic acid molecule or polypeptide, or a fragment thereof, in a sample from an individual, wherein the one or more treatment options comprise an ALK-targeted therapy. In some embodiments, responsive to the acquisition of knowledge of the presence of the ALK fusion nucleic acid molecule or polypeptide, or a fragment thereof, in a sample from an individual: (i) the individual is classified as a candidate to receive a treatment comprising an ALK-targeted therapy; and/or (ii) the individual is identified as likely to respond to a treatment that comprises an ALK-targeted therapy. In some embodiments, responsive to the acquisition of knowledge of the presence of the ALK fusion nucleic acid molecule or polypeptide, or a fragment thereof, in a sample from an individual, the individual is predicted to have longer survival when treated with a treatment comprising an ALK-targeted therapy, as compared to survival of an individual whose cancer does not comprise an ALK fusion nucleic acid molecule or polypeptide. In some embodiments, responsive to the acquisition of knowledge of the presence of the ALK fusion nucleic acid molecule or polypeptide, or a fragment thereof, in a sample from an individual, the method comprises administering to the individual an effective amount of a treatment that comprises an ALK-targeted therapy. In some embodiments, responsive to the acquisition of knowledge of the presence of the ALK fusion nucleic acid molecule or polypeptide, or a fragment thereof, in a sample from an individual, the individual is predicted to have increased risk of cancer recurrence, aggressive cancer, resistance to an anti-cancer therapy, e.g., a non-ALK-targeted therapy, poor prognosis, e.g., when treated with a non-ALK-targeted therapy, increased expression of ALK, or clinical benefit to ALK-targeted therapies, as compared to an individual whose cancer does not comprise an ALK fusion nucleic acid molecule or polypeptide. In some embodiments, the methods provided herein comprise providing an assessment of the ALK fusion nucleic acid molecule or polypeptide, or fragment thereof, e.g., in an individual or in a sample from an individual. In some embodiments, the methods provided herein comprise detecting the ALK fusion nucleic acid molecule or polypeptide, or a fragment thereof, in a sample from an individual, and administering to the individual an effective amount of a treatment that comprises an ALK-targeted therapy. In some embodiments, the methods provided herein comprise acquiring knowledge the presence of the ALK fusion nucleic acid molecule or polypeptide, or a fragment thereof, in a sample from an individual, and administering to the individual an effective amount of a treatment that comprises an ALK-targeted therapy.

[0134] In other aspects, provided herein are systems and non-transitory computer readable storage media. In some embodiments, a system of the disclosure comprises a memory configured to store one or more program instructions; and one or more processors configured to execute the one or more program instructions, the one or more program instructions when executed by the one or more processors are configured to: (a) obtain a plurality of sequence reads of one or more nucleic acids, wherein the one or more nucleic acids are derived from a sample obtained from an individual; (b) analyze the plurality of sequence reads for the presence of an ALK fusion nucleic acid molecule provided herein; and (c) detect, based on the analyzing, the ALK fusion nucleic acid molecule in the sample. In some embodiments, a non-transitory computer readable storage medium of the disclosure comprises one or more programs executable by one or more computer processors for performing a method, comprising: (a) obtaining, using the one or more processors, a plurality of sequence reads of one or more nucleic acids, wherein the one or more nucleic acids are derived from a sample obtained from an individual; (b) analyzing, using the one or more processors, the plurality of sequence reads for the presence of an ALK fusion nucleic acid molecule provided herein; and (c) detecting, using the one or more processors and based on the analyzing, the ALK fusion nucleic acid molecule in the sample.

### A. ALK Fusions

[0135] Certain aspects of the present disclosure relate to genomic rearrangements involving an anaplastic lymphoma kinase (ALK) gene, or a portion thereof. An ALK rearrangement of the present disclosure may relate to any chromosomal translocation, fusion, or rearrangement involving the locus of an ALK gene. In some embodiments, the rearrangements of the disclosure result in an ALK fusion nucleic acid molecule that comprises at least a portion of an ALK gene fused to at least a portion of another gene, such as any of an ABCB11, ACTN4, AGAP1, APH1A, AZI2, BTBD9, C2orf73, CAPN14, CARMIL1, CASP8, CDC42BPA, CIB4, CNTNAP5, COL3A1, CPQ, CPSF7, CREBBP, CTBP1, CTNND1, CYP51A1, CYS1, EPHA2, FHOD3, FILIP1L, GMCL1, GPN1, GPR113, HADHA, HS1BP3, INTS9, ITGA6, KCTD18, KIF5C, KLC4, LINC00535, LRRFIP2, MAGOHB, MAMDC4, MANBA, MAP3K9, MED13L, METTL25, MTBP, MYH10, MYO5C, NFIA, NINJ2, OPRM1, OTX1, PAQR4, PDCD10, PDE3A, PELI1, PLEC, PTGER4, PTPRJ, QKI, RPS6KA5, SASH1, SEC16B, SKAP1, SLC25A13, SLC30A6, SNX17, SOX13, SRSF7, TANGO6, TG, TMCO3, TNS3, TRIM24, TTC28, UBE2L3, UBE3B, UTRN, VASP, WDR92, YPEL5, ZNF446, ZNF454, ZNF513, or ZSWIM2 gene, or a gene listed in Table 1. Accordingly, certain aspects of the present disclosure relate to ALK fusion nucleic acid molecules, as well as to ALK fusion polypeptides encoded by such ALK fusion nucleic acid molecules.

[0136] As used herein “anaplastic lymphoma kinase” or “ALK” refer to a gene encoding an ALK mRNA or polypeptide. The ALK gene encodes the ALK receptor tyrosine kinase protein. ALK is also known as CD246, NBLST3, anaplastic lymphoma receptor tyrosine kinase, and ALK receptor tyrosine kinase. In some embodiments, an ALK gene is a human ALK gene. An exemplary ALK gene is represented by NCBI Gene ID No. 238. Exemplary ALK transcript sequences are represented by NCBI Ref. Seq. NM_004304 and provided below as SEQ ID NO: 90. Exemplary amino acid sequences of an ALK polypeptide are represented by NCBI Ref. Seq. NP_004295 and provided below as SEQ ID NO: 185.

(SEQ ID NO: 90)
ATGGGAGCCATCGGGCTCCTGTGGCTCCTGCCGCTGCTGCTTTCCACGGCAGCTGTGGGCTCCGGGATGGGGACC
GGCCAGCGCGCGGGCTCCCCAGCTGCGGGGCCGCCGCTGCAGCCCCGGGAGCCACTCAGCTACTCGCGCCTGCAG
AGGAAGAGTCTGGCAGTTGACTTCGTGGTGCCCTCGCTCTTCCGTGTCTACGCCCGGGACCTACTGCTGCCACCA
TCCTCCTCGGAGCTGAAGGCTGGCAGGCCCGAGGCCCGCGGCTCGCTAGCTCTGGACTGCGCCCCGCTGCTCAGG
TTGCTGGGGCCGGCGCCGGGGGTCTCCTGGACCGCCGGTTCACCAGCCCCGGCAGAGGCCCGGACGCTGTCCAGG
GTGCTGAAGGGCGGCTCCGTGCGCAAGCTCCGGCGTGCCAAGCAGTTGGTGCTGGAGCTGGGCGAGGAGGCGATC
TTGGAGGGTTGCGTCGGGCCCCCCGGGGAGGCGGCTGTGGGGCTGCTCCAGTTCAATCTCAGCGAGCTGTTCAGT
TGGTGGATTCGCCAAGGCGAAGGGCGACTGAGGATCCGCCTGATGCCCGAGAAGAAGGCGTCGGAAGTGGGCAGA
GAGGGAAGGCTGTCCGCGGCAATTCGCGCCTCCCAGCCCCGCCTTCTCTTCCAGATCTTCGGGACTGGTCATAGC
TCCTTGGAATCACCAACAAACATGCCTTCTCCTTCTCCTGATTATTTTACATGGAATCTCACCTGGATAATGAAA
GACTCCTTCCCTTTCCTGTCTCATCGCAGCCGATATGGTCTGGAGTGCAGCTTTGACTTCCCCTGTGAGCTGGAG
TATTCCCCTCCACTGCATGACCTCAGGAACCAGAGCTGGTCCTGGCGCCGCATCCCCTCCGAGGAGGCCTCCCAG
ATGGACTTGCTGGATGGGCCTGGGGCAGAGCGTTCTAAGGAGATGCCCAGAGGCTCCTTTCTCCTTCTCAACACC
TCAGCTGACTCCAAGCACACCATCCTGAGTCCGTGGATGAGGAGCAGCAGTGAGCACTGCACACTGGCCGTCTCG
GTGCACAGGCACCTGCAGCCCTCTGGAAGGTACATTGCCCAGCTGCTGCCCCACAACGAGGCTGCAAGAGAGATC
CTCCTGATGCCCACTCCAGGGAAGCATGGTTGGACAGTGCTCCAGGGAAGAATCGGGCGTCCAGACAACCCATTT
CGAGTGGCCCTGGAATACATCTCCAGTGGAAACCGCAGCTTGTCTGCAGTGGACTTCTTTGCCCTGAAGAACTGC
AGTGAAGGAACATCCCCAGGCTCCAAGATGGCCCTGCAGAGCTCCTTCACTTGTTGGAATGGGACAGTCCTCCAG
CTTGGGCAGGCCTGTGACTTCCACCAGGACTGTGCCCAGGGAGAAGATGAGAGCCAGATGTGCCGGAAACTGCCT
GTGGGTTTTTACTGCAACTTTGAAGATGGCTTCTGTGGCTGGACCCAAGGCACACTGTCACCCCACACTCCTCAA
TGGCAGGTCAGGACCCTAAAGGATGCCCGGTTCCAGGACCACCAAGACCATGCTCTATTGCTCAGTACCACTGAT
GTCCCCGCTTCTGAAAGTGCTACAGTGACCAGTGCTACGTTTCCTGCACCGATCAAGAGCTCTCCATGTGAGCTC
CGAATGTCCTGGCTCATTCGTGGAGTCTTGAGGGGAAACGTGTCCTTGGTGCTAGTGGAGAACAAAACCGGGAAG
GAGCAAGGCAGGATGGTCTGGCATGTCGCCGCCTATGAAGGCTTGAGCCTGTGGCAGTGGATGGTGTTGCCTCTC
CTCGATGTGTCTGACAGGTTCTGGCTGCAGATGGTCGCATGGTGGGGACAAGGATCCAGAGCCATCGTGGCTTTT
GACAATATCTCCATCAGCCTGGACTGCTACCTCACCATTAGCGGAGAGGACAAGATCCTGCAGAATACAGCACCC
AAATCAAGAAACCTGTTTGAGAGAAACCCAAACAAGGAGCTGAAACCCGGGGAAAATTCACCAAGACAGACCCCC
ATCTTTGACCCTACAGTTCATTGGCTGTTCACCACATGTGGGGCCAGCGGGCCCCATGGCCCCACCCAGGCACAG
TGCAACAACGCCTACCAGAACTCCAACCTGAGCGTGGAGGTGGGGAGCGAGGGCCCCCTGAAAGGCATCCAGATC
TGGAAGGTGCCAGCCACCGACACCTACAGCATCTCGGGCTACGGAGCTGCTGGCGGGAAAGGCGGGAAGAACACC
ATGATGCGGTCCCACGGCGTGTCTGTGCTGGGCATCTTCAACCTGGAGAAGGATGACATGCTGTACATCCTGGTT
GGGCAGCAGGGAGAGGACGCCTGCCCCAGTACAAACCAGTTAATCCAGAAAGTCTGCATTGGAGAGAACAATGTG
ATAGAAGAAGAAATCCGTGTGAACAGAAGCGTGCATGAGTGGGCAGGAGGCGGAGGAGGAGGGGGTGGAGCCACC
TACGTATTTAAGATGAAGGATGGAGTGCCGGTGCCCCTGATCATTGCAGCCGGAGGTGGTGGCAGGGCCTACGGG
GCCAAGACAGACACGTTCCACCCAGAGAGACTGGAGAATAACTCCTCGGTTCTAGGGCTAAACGGCAATTCCGGA
GCCGCAGGTGGTGGAGGTGGCTGGAATGATAACACTTCCTTGCTCTGGGCCGGAAAATCTTTGCAGGAGGGTGCC
ACCGGAGGACATTCCTGCCCCCAGGCCATGAAGAAGTGGGGGTGGGAGACAAGAGGGGGTTTCGGAGGGGGTGGA
GGGGGGTGCTCCTCAGGTGGAGGAGGCGGAGGATATATAGGCGGCAATGCAGCCTCAAACAATGACCCCGAAATG
GATGGGGAAGATGGGGTTTCCTTCATCAGTCCACTGGGCATCCTGTACACCCCAGCTTTAAAAGTGATGGAAGGC
CACGGGGAAGTGAATATTAAGCATTATCTAAACTGCAGTCACTGTGAGGTAGACGAATGTCACATGGACCCTGAA
AGCCACAAGGTCATCTGCTTCTGTGACCACGGGACGGTGCTGGCTGAGGATGGCGTCTCCTGCATTGTGTCACCC
ACCCCGGAGCCACACCTGCCACTCTCGCTGATCCTCTCTGTGGTGACCTCTGCCCTCGTGGCCGCCCTGGTCCTG
GCTTTCTCCGGCATCATGATTGTGTACCGCCGGAAGCACCAGGAGCTGCAAGCCATGCAGATGGAGCTGCAGAGC
CCTGAGTACAAGCTGAGCAAGCTCCGCACCTCGACCATCATGACCGACTACAACCCCAACTACTGCTTTGCTGGC
AAGACCTCCTCCATCAGTGACCTGAAGGAGGTGCCGCGGAAAAACATCACCCTCATTCGGGGTCTGGGCCATGGC
GCCTTTGGGGAGGTGTATGAAGGCCAGGTGTCCGGAATGCCCAACGACCCAAGCCCCCTGCAAGTGGCTGTGAAG
ACGCTGCCTGAAGTGTGCTCTGAACAGGACGAACTGGATTTCCTCATGGAAGCCCTGATCATCAGCAAATTCAAC
CACCAGAACATTGTTCGCTGCATTGGGGTGAGCCTGCAATCCCTGCCCCGGTTCATCCTGCTGGAGCTCATGGCG
GGGGGAGACCTCAAGTCCTTCCTCCGAGAGACCCGCCCTCGCCCGAGCCAGCCCTCCTCCCTGGCCATGCTGGAC
CTTCTGCACGTGGCTCGGGACATTGCCTGTGGCTGTCAGTATTTGGAGGAAAACCACTTCATCCACCGAGACATT
GCTGCCAGAAACTGCCTCTTGACCTGTCCAGGCCCTGGAAGAGTGGCCAAGATTGGAGACTTCGGGATGGCCCGA
GACATCTACAGGGCGAGCTACTATAGAAAGGGAGGCTGTGCCATGCTGCCAGTTAAGTGGATGCCCCCAGAGGCC
TTCATGGAAGGAATATTCACTTCTAAAACAGACACATGGTCCTTTGGAGTGCTGCTATGGGAAATCTTTTCTCTT
GGATATATGCCATACCCCAGCAAAAGCAACCAGGAAGTTCTGGAGTTTGTCACCAGTGGAGGCCGGATGGACCCA
CCCAAGAACTGCCCTGGGCCTGTATACCGGATAATGACTCAGTGCTGGCAACATCAGCCTGAAGACAGGCCCAAC
TTTGCCATCATTTTGGAGAGGATTGAATACTGCACCCAGGACCCGGATGTAATCAACACCGCTTTGCCGATAGAA
TATGGTCCACTTGTGGAAGAGGAAGAGAAAGTGCCTGTGAGGCCCAAGGACCCTGAGGGGGTTCCTCCTCTCCTG
GTCTCTCAACAGGCAAAACGGGAGGAGGAGCGCAGCCCAGCTGCCCCACCACCTCTGCCTACCACCTCCTCTGGC
AAGGCTGCAAAGAAACCCACAGCTGCAGAGATCTCTGTTCGAGTCCCTAGAGGGCCGGCCGTGGAAGGGGGACAC
GTGAATATGGCATTCTCTCAGTCCAACCCTCCTTCGGAGTTGCACAAGGTCCACGGATCCAGAAACAAGCCCACC
AGCTTGTGGAACCCAACGTACGGCTCCTGGTTTACAGAGAAACCCACCAAAAAGAATAATCCTATAGCAAAGAAG
GAGCCACACGACAGGGGTAACCTGGGGCTGGAGGGAAGCTGTACTGTCCCACCTAACGTTGCAACTGGGAGACTT
CCGGGGGCCTCACTGCTCCTAGAGCCCTCTTCGCTGACTGCCAATATGAAGGAGGTACCTCTGTTCAGGCTACGT
CACTTCCCTTGTGGGAATGTCAATTACGGCTACCAGCAACAGGGCTTGCCCTTAGAAGCCGCTACTGCCCCTGGA
GCTGGTCATTACGAGGATACCATTCTGAAAAGCAAGAATAGCATGAACCAGCCTGGGCCCTGA

[0137] Exemplary amino acid sequences of an ALK polypeptide are represented by NCBI Ref. Seq. NP_004295 and provided below as SEQ ID NO: 185.

(SEQ ID NO: 185)
MGAIGLLWLLPLLLSTAAVGSGMGTGQRAGSPAAGPPLQPREPLSYSRLQRKSLAVDFVVPSLFRVYARDLLLPP
SSSELKAGRPEARGSLALDCAPLLRLLGPAPGVSWTAGSPAPAEARTLSRVLKGGSVRKLRRAKQLVLELGEEAI
LEGCVGPPGEAAVGLLQFNLSELFSWWIRQGEGRLRIRLMPEKKASEVGREGRLSAAIRASQPRLLFQIFGTGHS
SLESPTNMPSPSPDYFTWNLTWIMKDSFPFLSHRSRYGLECSFDFPCELEYSPPLHDLRNQSWSWRRIPSEEASQ
MDLLDGPGAERSKEMPRGSFLLLNTSADSKHTILSPWMRSSSEHCTLAVSVHRHLQPSGRYIAQLLPHNEAAREI
LLMPTPGKHGWTVLQGRIGRPDNPFRVALEYISSGNRSLSAVDFFALKNCSEGTSPGSKMALQSSFTCWNGTVLQ
LGQACDFHQDCAQGEDESQMCRKLPVGFYCNFEDGFCGWTQGTLSPHTPQWQVRTLKDARFQDHQDHALLLSTTD
VPASESATVTSATFPAPIKSSPCELRMSWLIRGVLRGNVSLVLVENKTGKEQGRMVWHVAAYEGLSLWQWMVLPL
LDVSDREWLQMVAWWGQGSRAIVAFDNISISLDCYLTISGEDKILQNTAPKSRNLFERNPNKELKPGENSPRQTP
IFDPTVHWLFTTCGASGPHGPTQAQCNNAYQNSNLSVEVGSEGPLKGIQIWKVPATDTYSISGYGAAGGKGGKNT
MMRSHGVSVLGIFNLEKDDMLYILVGQQGEDACPSTNQLIQKVCIGENNVIEEEIRVNRSVHEWAGGGGGGGGAT
YVFKMKDGVPVPLIIAAGGGGRAYGAKTDTFHPERLENNSSVLGLNGNSGAAGGGGGWNDNISLLWAGKSLQEGA
TGGHSCPQAMKKWGWETRGGFGGGGGGCSSGGGGGGYIGGNAASNNDPEMDGEDGVSFISPLGILYTPALKVMEG
HGEVNIKHYLNCSHCEVDECHMDPESHKVICFCDHGTVLAEDGVSCIVSPTPEPHLPLSLILSVVTSALVAALVL
AFSGIMIVYRRKHQELQAMQMELQSPEYKLSKLRTSTIMTDYNPNYCFAGKTSSISDLKEVPRKNITLIRGLGHG
AFGEVYEGQVSGMPNDPSPLQVAVKTLPEVCSEQDELDFLMEALIISKFNHQNIVRCIGVSLQSLPRFILLELMA
GGDLKSFLRETRPRPSQPSSLAMLDLLHVARDIACGCQYLEENHFIHRDIAARNCLLTCPGPGRVAKIGDFGMAR
DIYRASYYRKGGCAMLPVKWMPPEAFMEGIFTSKTDTWSFGVLLWEIFSLGYMPYPSKSNQEVLEFVTSGGRMDP
PKNCPGPVYRIMTQCWQHQPEDRPNFAIILERIEYCTQDPDVINTALPIEYGPLVEEEEKVPVRPKDPEGVPPLL
VSQQAKREEERSPAAPPPLPTTSSGKAAKKPTAAEISVRVPRGPAVEGGHVNMAFSQSNPPSELHKVHGSRNKPT
SLWNPTYGSWFTEKPTKKNNPIAKKEPHDRGNLGLEGSCTVPPNVATGRLPGASLLLEPSSLTANMKEVPLERLR
HFPCGNVNYGYQQQGLPLEAATAPGAGHYEDTILKSKNSMNQPGP

[0138] As used herein “ABCB11” refers to a gene encoding an ABCB11 mRNA or polypeptide. The ABCB11 gene encodes a bile salt export pump protein. ABCB11 is also known as ABC16, BRIC2, BSEP, PFIC-2, PFIC2, PGY4, and SPGP. In some embodiments, an ABCB11 gene is a human ABCB11 gene. An exemplary ABCB11 gene is represented by NCBI Gene ID No. 8647. Exemplary ABCB11 transcript sequences are represented by NCBI Ref. Seq. NM_003742 and provided herein as SEQ ID NO: 87. Exemplary amino acid sequences of an ABCB11 polypeptide are represented by NCBI Ref. Seq. NP_003733 and provided herein as SEQ ID NO: 182.

[0139] As used herein “ACTN4” refers to a gene encoding an ACTN4 mRNA or polypeptide. The ACTN4 gene encodes the alpha-actinin-4 protein. ACTN4 is also known as ACTININ-4, FSGS, and FSGS1. In some embodiments, an ACTN4 gene is a human ACTN4 gene. An exemplary ACTN4 gene is represented by NCBI Gene ID No. 81. Exemplary ACTN4 transcript sequences are represented by NCBI Ref. Seq. NM_004924 and provided herein as SEQ ID NO: 88. Exemplary amino acid sequences of an ACTN4 polypeptide are represented by NCBI Ref. Seq. NP_004915 and provided herein as SEQ ID NO: 183.

[0140] As used herein “AGAP1” refers to a gene encoding an AGAP1 mRNA or polypeptide. The AGAP1 gene encodes an arf-GAP with GTPase, ANK repeat and PH domain-containing protein 1 protein. AGAP1 is also known as AGAP-1, CENTG2, cnt-g2, and GGAP1. In some embodiments, an AGAP1 gene is a human AGAP1 gene. An exemplary AGAP1 gene is represented by NCBI Gene ID No. 116987. Exemplary AGAP1 transcript sequences are represented by NCBI Ref. Seq. NM_014914 and provided herein as SEQ ID NO: 89. Exemplary amino acid sequences of an AGAP1 polypeptide are represented by NCBI Ref. Seq. NP_055729 and provided herein as SEQ ID NO: 184.

[0141] As used herein “APH1A” refers to a gene encoding an APH1A mRNA or polypeptide. The APH1A gene encodes a gamma-secretase subunit APH-1A protein. APH1A is also known as 6530402N02Rik, APH-1, APH-1A, and CGI-78. In some embodiments, an APH1A gene is a human APH1A gene. An exemplary APH1A gene is represented by NCBI Gene ID No. 51107. Exemplary APH1A transcript sequences are represented by NCBI Ref. Seq. NM_016022 and provided herein as SEQ ID NO: 91. Exemplary amino acid sequences of an APH1A polypeptide are represented by NCBI Ref. Seq. NP_057106.2 and provided herein as SEQ ID NO: 186.

[0142] As used herein “AZI2” refers to a gene encoding an AZI2 mRNA or polypeptide. The AZI2 gene encodes a 5-azacytidine-induced protein 2 protein. AZI2 is also known as AZ2, NAP1, and TILP. In some embodiments, an AZI2 gene is a human AZI2 gene. An exemplary AZI2 gene is represented by NCBI Gene ID No. 64343. Exemplary AZI2 transcript sequences are represented by NCBI Ref. Seq. NM_022461 and provided herein as SEQ ID NO: 92. Exemplary amino acid sequences of an AZI2 polypeptide are represented by NCBI Ref. Seq. NP_071906 and provided herein as SEQ ID NO: 187.

[0143] As used herein “BTBD9” refers to a gene encoding a BTBD9 mRNA or polypeptide. The BTBD9 gene encodes the BTB/POZ domain-containing protein 9. BTBD9 is also known as dJ322I12.1. In some embodiments, a BTBD9 gene is a human BTBD9 gene. An exemplary BTBD9 gene is represented by NCBI Gene ID No. 114781. Exemplary BTBD9 transcript sequences are represented by NCBI Ref. Seq. NM_052893 and provided herein as SEQ ID NO: 93. Exemplary amino acid sequences of a BTBD9 polypeptide are represented by NCBI Ref. Seq. NP_443125 and provided herein as SEQ ID NO: 188.

[0144] As used herein “C2orf73” refers to a gene encoding a C2orf73 mRNA or polypeptide. The C2orf73 gene encodes the uncharacterized protein C2orf73. In some embodiments, a C2orf73 gene is a human C2orf73 gene. An exemplary C2orf73 gene is represented by NCBI Gene ID No. 129852. Exemplary C2orf73 transcript sequences are represented by NCBI Ref. Seq. NM_001100396 and provided herein as SEQ ID NO: 95. Exemplary amino acid sequences of a C2orf73 polypeptide are represented by NCBI Ref. Seq. NP_001093866 and provided herein as SEQ ID NO: 190.

[0145] As used herein “CAPN14” refers to a gene encoding a CAPN14 mRNA or polypeptide. The CAPN14 gene encodes the calpain-14 protein. In some embodiments, a CAPN14 gene is a human CAPN14 gene. An exemplary CAPN14 gene is represented by NCBI Gene ID No. 440854. Exemplary CAPN14 transcript sequences are represented by NCBI Ref. Seq. NM_001145122 and provided herein as SEQ ID NO: 96. Exemplary amino acid sequences of a CAPN14 polypeptide are represented by NCBI Ref. Seq. NP_001138594 and provided herein as SEQ ID NO: 191.

[0146] As used herein “CARMIL1” refers to a gene encoding a CARMIL1 mRNA or polypeptide. The CARMIL1 gene encodes an F-actin-uncapping protein. CARMIL1 is also known as CARMIL, CARMIL1a, dJ501N12.1, dJ501N12.5, LRRC16, and LRRC16A. In some embodiments, a CARMIL1 gene is a human CARMIL1 gene. An exemplary CARMIL1 gene is represented by NCBI Gene ID No. 55604. Exemplary CARMIL1 transcript sequences are represented by NCBI Ref. Seq. NM_017640 and provided herein as SEQ ID NO: 97. Exemplary amino acid sequences of an CARMIL1 polypeptide are represented by NCBI Ref. Seq. NP_060110 and provided herein as SEQ ID NO: 192.

[0147] As used herein “CASP8” refers to a gene encoding a CASP8 mRNA or polypeptide. The CASP8 gene encodes the caspase-8 protein. CASP8 is also known as ALPS2B, CAP4, Casp-8, FLICE, MACH, and MCH5. In some embodiments, a CASP8 gene is a human CASP8 gene. An exemplary CASP8 gene is represented by NCBI Gene ID No. 841. Exemplary CASP8 transcript sequences are represented by NCBI Ref. Seq. NM_001228 and provided herein as SEQ ID NO: 98. Exemplary amino acid sequences of a CASP8 polypeptide are represented by NCBI Ref. Seq. NP_001219 and provided herein as SEQ ID NO: 193.

[0148] As used herein “CDC42BPA” refers to a gene encoding a CDC42BPA mRNA or polypeptide. The CDC42BPA gene encodes the serine/threonine-protein kinase MRCK alpha protein. CDC42BPA is also known as MRCK, MRCKA, and PK428. In some embodiments, a CDC42BPA gene is a human CDC42BPA gene. An exemplary CDC42BPA gene is represented by NCBI Gene ID No. 8476. Exemplary CDC42BPA transcript sequences are represented by NCBI Ref. Seq. NM_003607 and provided herein as SEQ ID NO: 99. Exemplary amino acid sequences of a CDC42BPA polypeptide are represented by NCBI Ref. Seq. NP_003598 and provided herein as SEQ ID NO: 194.

[0149] As used herein “CIB4” refers to a gene encoding a CIB4 mRNA or polypeptide. The CIB4 gene encodes the calcium and integrin-binding family member 4 protein. CIB4 is also known as KIP4. In some embodiments, a CIB4 gene is a human CIB4 gene. An exemplary CIB4 gene is represented by NCBI Gene ID No. 130106. Exemplary CIB4 transcript sequences are represented by NCBI Ref. Seq. NM_001029881 and provided herein as SEQ ID NO: 100. Exemplary amino acid sequences of a CIB4 polypeptide are represented by NCBI Ref. Seq. NP_001025052 and provided herein as SEQ ID NO: 195.

[0150] As used herein “CNTNAP5” refers to a gene encoding a CNTNAP5 mRNA or polypeptide. The CNTNAP5 gene encodes the contactin-associated protein-like 5 protein. CNTNAP5 is also known as caspr5. In some embodiments, a CNTNAP5 gene is a human CNTNAP5 gene. An exemplary CNTNAP5 gene is represented by NCBI Gene ID No. 129684. Exemplary CNTNAP5 transcript sequences are represented by NCBI Ref. Seq. NM_130773 and provided herein as SEQ ID NO: 101. Exemplary amino acid sequences of a CNTNAP5 polypeptide are represented by NCBI Ref. Seq. NP_570129 and provided herein as SEQ ID NO: 196.

[0151] As used herein “COL3A1” refers to a gene encoding a COL3A1 mRNA or polypeptide. The COL3A1 gene encodes the collagen alpha-1(III) chain protein. COL3A1 is also known as EDS4A, EDSVASC, and PMGEDSV. In some embodiments, a COL3A1 gene is a human COL3A1 gene. An exemplary COL3A1 gene is represented by NCBI Gene ID No. 1281. Exemplary COL3A1 transcript sequences are represented by NCBI Ref. Seq. NM_000090 and provided herein as SEQ ID NO: 103. Exemplary amino acid sequences of a COL3A1 polypeptide are represented by NCBI Ref. Seq. NP_000081 and provided herein as SEQ ID NO: 198.

[0152] As used herein “CPQ” refers to a gene encoding a CPQ mRNA or polypeptide. The CPQ gene encodes the carboxypeptidase Q protein. CPQ is also known as LDP and PGCP. In some embodiments, a CPQ gene is a human CPQ gene. An exemplary CPQ gene is represented by NCBI Gene ID No. 10404. Exemplary CPQ transcript sequences are represented by NCBI Ref. Seq. NM_016134 and provided herein as SEQ ID NO: 104. Exemplary amino acid sequences of a CPQ polypeptide are represented by NCBI Ref. Seq. NP_057218 and provided herein as SEQ ID NO: 199.

[0153] As used herein “CPSF7” refers to a gene encoding a CPSF7 mRNA or polypeptide. The CPSF7 gene encodes the cleavage and polyadenylation specificity factor subunit 7 protein. CPSF7 is also known as CFIm59. In some embodiments, a CPSF7 gene is a human CPSF7 gene. An exemplary CPSF7 gene is represented by NCBI Gene ID No. 79869. Exemplary CPSF7 transcript sequences are represented by NCBI Ref. Seq. NM_024811 and provided herein as SEQ ID NO: 105. Exemplary amino acid sequences of a CPSF7 polypeptide are represented by NCBI Ref. Seq. NP_079087 and provided herein as SEQ ID NO: 200.

[0154] As used herein “CREBBP” refers to a gene encoding a CREBBP mRNA or polypeptide. The CREBBP gene encodes the CREB-binding protein. CREBBP is also known as CBP, KAT3A, MKHK1, RSTS and RSTS1. In some embodiments, a CREBBP gene is a human CREBBP gene. An exemplary CREBBP gene is represented by NCBI Gene ID No. 1387. Exemplary CREBBP transcript sequences are represented by NCBI Ref. Seq. NM_004380 and provided herein as SEQ ID NO: 106. Exemplary amino acid sequences of a CREBBP polypeptide are represented by NCBI Ref. Seq. NP_004371 and provided herein as SEQ ID NO: 201.

[0155] As used herein “CTBP1” refers to a gene encoding a CTBP1 mRNA or polypeptide. The CTBP1 gene encodes the C-terminal-binding protein 1 protein. CTBP1 is also known as BARS and HADDTS. In some embodiments, a CTBP1 gene is a human CTBP1 gene. An exemplary CTBP1 gene is represented by NCBI Gene ID No. 1487. Exemplary CTBP1 transcript sequences are represented by NCBI Ref. Seq. NM_001328 and provided herein as SEQ ID NO: 107. Exemplary amino acid sequences of a CTBP1 polypeptide are represented by NCBI Ref. Seq. NP_001319 and provided herein as SEQ ID NO: 202.

[0156] As used herein “CTNND1” refers to a gene encoding a CTNND1 mRNA or polypeptide. The CTNND1 gene encodes the catenin delta-1 protein. CTNND1 is also known as BCDS2, CAS, CTNND, p120, p120(CAS),p120(CTN), P120CAS, and P120CTN. In some embodiments, a CTNND1 gene is a human CTNND1 gene. An exemplary CTNND1 gene is represented by NCBI Gene ID No. 1500. Exemplary CTNND1 transcript sequences are represented by NCBI Ref. Seq. NM_001331 and provided herein as SEQ ID NO: 108. Exemplary amino acid sequences of a CTNND1 polypeptide are represented by NCBI Ref. Seq. NP_001322 and provided herein as SEQ ID NO: 203.

[0157] As used herein “CYP51A1” refers to a gene encoding a CYP51A1 mRNA or polypeptide. The CYP51A1 gene encodes the lanosterol 14-alpha demethylase protein. CYP51A1 is also known as CP51; CYP51, CYPL1, LDM, P450-14DM, and P450L1. In some embodiments, a CYP51A1 gene is a human CYP51A1 gene. An exemplary CYP51A1 gene is represented by NCBI Gene ID No. 1595. Exemplary CYP51A1 transcript sequences are represented by NCBI Ref. Seq. NM_000786 and provided herein as SEQ ID NO: 109. Exemplary amino acid sequences of a CYP51A1 polypeptide are represented by NCBI Ref. Seq. NP_000777 and provided herein as SEQ ID NO: 204.

[0158] As used herein “CYS1” refers to a gene encoding a CYS1 mRNA or polypeptide. The CYS1 gene encodes the cystin-1 protein. In some embodiments, a CYS1 gene is a human CYS1 gene. An exemplary CYS1 gene is represented by NCBI Gene ID No. 192668. Exemplary CYS1 transcript sequences are represented by NCBI Ref. Seq. NM_001037160 and provided herein as SEQ ID NO: 110. Exemplary amino acid sequences of a CYS1 polypeptide are represented by NCBI Ref. Seq. NP_001032237 and provided herein as SEQ ID NO: 205.

[0159] As used herein “EPHA2” refers to a gene encoding an EPHA2 mRNA or polypeptide. The EPHA2 gene encodes the ephrin type-A receptor 2 protein. EPHA2 is also known as ARCC2, CTPA, CTPP1, CTRCT6, and ECK. In some embodiments, an EPHA2 gene is a human EPHA2 gene. An exemplary EPHA2 gene is represented by NCBI Gene ID No. 1969. Exemplary EPHA2 transcript sequences are represented by NCBI Ref. Seq. NM_004431 and provided herein as SEQ ID NO: 112. Exemplary amino acid sequences of an EPHA2 polypeptide are represented by NCBI Ref. Seq. NP_004422 and provided herein as SEQ ID NO: 207.

[0160] As used herein “FHOD3” refers to a gene encoding an FHOD3 mRNA or polypeptide. The FHOD3 gene encodes the FH1/FH2 domain-containing protein 3 protein. FHOD3 is also known as CMH28, FHOS2, and Formactin2. In some embodiments, an FHOD3 gene is a human FHOD3 gene. An exemplary FHOD3 gene is represented by NCBI Gene ID No. 80206. Exemplary FHOD3 transcript sequences are represented by NCBI Ref. Seq. NM_025135 and provided herein as SEQ ID NO: 113. Exemplary amino acid sequences of an FHOD3 polypeptide are represented by NCBI Ref. Seq. NP_079411 and provided herein as SEQ ID NO: 208.

[0161] As used herein “FILP1L” refers to a gene encoding an FILP1L mRNA or polypeptide. The FILP1L gene encodes the filamin A-interacting protein 1-like protein. FILP1L is also known as DOC-1; DOC1, GIP130 and GIP90. In some embodiments, a FILP1L gene is a human FILP1L gene. An exemplary FILP1L gene is represented by NCBI Gene ID No. 11259. Exemplary FILP1L transcript sequences are represented by NCBI Ref. Seq. NM_182909 and provided herein as SEQ ID NO: 114. Exemplary amino acid sequences of an FILP1L polypeptide are represented by NCBI Ref. Seq. NP_878913 and provided herein as SEQ ID NO: 209.

[0162] As used herein “GMCL1” refers to a gene encoding a GMCL1 mRNA or polypeptide. The GMCL1 gene encodes the germ cell-less protein-like 1 protein. GMCL1 is also known as BTBD13, GCL, GCL1, and SPATA29. In some embodiments, a GMCL1 gene is a human GMCL1 gene. An exemplary GMCL1 gene is represented by NCBI Gene ID No. 64395. Exemplary GMCL1 transcript sequences are represented by NCBI Ref. Seq. NM_178439 and provided herein as SEQ ID NO: 116. Exemplary amino acid sequences of a GMCL1 polypeptide are represented by NCBI Ref. Seq. NP_848526 and provided herein as SEQ ID NO: 210.

[0163] As used herein “GPN1” refers to a gene encoding a GPN1 mRNA or polypeptide. The GPN1 gene encodes the GPN-loop GTPase 1 protein. GPN1 is also known as ATPBD1A, MBDIN, NTPBP, RPAP4, and XAB1. In some embodiments, a GPN1 gene is a human GPN1 gene. An exemplary GPN1 gene is represented by NCBI Gene ID No. 11321. Exemplary GPN1 transcript sequences are represented by NCBI Ref. Seq. NM_007266 and provided herein as SEQ ID NO: 117. Exemplary amino acid sequences of a GPN1 polypeptide are represented by NCBI Ref. Seq. NP_009197 and provided herein as SEQ ID NO: 211.

[0164] As used herein “GPR113” refers to a gene encoding a GPR113 mRNA or polypeptide. The GPR113 gene encodes the adhesion G-protein coupled receptor F3 protein. GPR113 is also known as ADGRF3 and PGR23. In some embodiments, a GPR113 gene is a human GPR113 gene. An exemplary GPR113 gene is represented by NCBI Gene ID No. 165082. Exemplary GPR113 transcript sequences are represented by NCBI Ref. Seq. NM_153835 and provided herein as SEQ ID NO: 118. Exemplary amino acid sequences of a GPR113 polypeptide are represented by NCBI Ref. Seq. NP_722577 and provided herein as SEQ ID NO: 212.

[0165] As used herein “HADHA” refers to a gene encoding a HADHA mRNA or polypeptide. The HADHA gene encodes the trifunctional enzyme subunit alpha protein. HADHA is also known as ECHA, GBP, HADH, LCEH, LCHAD, MTPA, and TP-ALPHA. In some embodiments, a HADHA gene is a human HADHA gene. An exemplary HADHA gene is represented by NCBI Gene ID No. 3030. Exemplary HADHA transcript sequences are represented by NCBI Ref. Seq. NM_000182 and provided herein as SEQ ID NO: 120. Exemplary amino acid sequences of a HADHA polypeptide are represented by NCBI Ref. Seq. NP_000173 and provided herein as SEQ ID NO: 214.

[0166] As used herein “HS1BP3” refers to a gene encoding a HS1BP3 mRNA or polypeptide. The HS1BP3 gene encodes the HCLS1-binding protein 3 protein. HS1BP3 is also known as ETM2 and HS1-BP3. In some embodiments, a HS1BP3 gene is a human HS1BP3 gene. An exemplary HS1BP3 gene is represented by NCBI Gene ID No. 64342. Exemplary HS1BP3 transcript sequences are represented by NCBI Ref. Seq. NM_022460 and provided herein as SEQ ID NO: 121. Exemplary amino acid sequences of a HS1BP3 polypeptide are represented by NCBI Ref. Seq. NP_071905 and provided herein as SEQ ID NO: 215.

[0167] As used herein “INTS9” refers to a gene encoding a INTS9 mRNA or polypeptide. The INTS9 gene encodes the integrator complex subunit 9 protein. INTS9 is also known as CPSF2L, INT9, and RC74. In some embodiments, a INTS9 gene is a human INTS9 gene. An exemplary INTS9 gene is represented by NCBI Gene ID No. 55756. Exemplary INTS9 transcript sequences are represented by NCBI Ref. Seq. NM_018250 and provided herein as SEQ ID NO: 122. Exemplary amino acid sequences of a INTS9 polypeptide are represented by NCBI Ref. Seq. NP_060720 and provided herein as SEQ ID NO: 216.

[0168] As used herein “ITGA6” refers to a gene encoding a ITGA6 mRNA or polypeptide. The ITGA6 gene encodes the integrin alpha-6 protein. ITGA6 is also known as CD49f, ITGA6B, and VLA-6. In some embodiments, a ITGA6 gene is a human ITGA6 gene. An exemplary ITGA6 gene is represented by NCBI Gene ID No. 3655. Exemplary ITGA6 transcript sequences are represented by NCBI Ref. Seq. NM_000210 and provided herein as SEQ ID NO: 123. Exemplary amino acid sequences of a ITGA6 polypeptide are represented by NCBI Ref. Seq. NP_000201 and provided herein as SEQ ID NO: 217.

[0169] As used herein “KCTD18” refers to a gene encoding a KCTD18 mRNA or polypeptide. The KCTD18 gene encodes the BTB/POZ domain-containing protein KCTD18. KCTD18 is also known as 6530404F10Rik. In some embodiments, a KCTD18 gene is a human KCTD18 gene. An exemplary KCTD18 gene is represented by NCBI Gene ID No. 130535. Exemplary KCTD18 transcript sequences are represented by NCBI Ref. Seq. NM_152387 and provided herein as SEQ ID NO: 124. Exemplary amino acid sequences of a KCTD18 polypeptide are represented by NCBI Ref. Seq. NP_689600 and provided herein as SEQ ID NO: 218.

[0170] As used herein “KIF5C” refers to a gene encoding a KIF5C mRNA or polypeptide. The KIF5C gene encodes the kinesin heavy chain 5C protein. KIF5C is also known as CDCBM2, KINN, NKHC, NKHC-2, and NKHC2. In some embodiments, a KIF5C gene is a human KIF5C gene. An exemplary KIF5C gene is represented by NCBI Gene ID No. 3800. Exemplary KIF5C transcript sequences are represented by NCBI Ref. Seq. NM_004522 and provided herein as SEQ ID NO: 125. Exemplary amino acid sequences of a KIF5C polypeptide are represented by NCBI Ref. Seq. NP_004513 and provided herein as SEQ ID NO: 219.

[0171] As used herein “KLC4” refers to a gene encoding a KLC4 mRNA or polypeptide. The KLC4 gene encodes the kinesin light chain 4 protein. KLC4 is also known as bA387M24.3 and KNSL8. In some embodiments, a KLC4 gene is a human KLC4 gene. An exemplary KLC4 gene is represented by NCBI Gene ID No. 89953. Exemplary KLC4 transcript sequences are represented by NCBI Ref. Seq. NM_201521 and provided herein as SEQ ID NO: 126. Exemplary amino acid sequences of a KLC4 polypeptide are represented by NCBI Ref. Seq. NP_958929 and provided herein as SEQ ID NO: 220.

[0172] As used herein “LINC00535” refers to a gene encoding a LINC00535 mRNA. The LINC00535 gene encodes the CIBAR1 divergent transcript. LINC00535 is also known as CIBAR1-DT. In some embodiments, a LINC00535 gene is a human LINC00535 gene. An exemplary LINC00535 gene is represented by NCBI Gene ID No. 642924. Exemplary LINC00535 transcript sequences are represented by NCBI Ref. Seq. NR_033858 and provided herein as SEQ ID NO: 127.

[0173] As used herein “LRRFIP2” refers to a gene encoding a LRRFIP2 mRNA or polypeptide. The LRRFIP2 gene encodes the leucine-rich repeat flightless-interacting protein 2. LRRFIP2 is also known as HUFI-2. In some embodiments, a LRRFIP2 gene is a human LRRFIP2 gene. An exemplary LRRFIP2 gene is represented by NCBI Gene ID No. 9209. Exemplary LRRFIP2 transcript sequences are represented by NCBI Ref. Seq. NM_006309 and provided herein as SEQ ID NO: 128. Exemplary amino acid sequences of a LRRFIP2 polypeptide are represented by NCBI Ref. Seq. NP_006300 and provided herein as SEQ ID NO: 221.

[0174] As used herein “MAGOHB” refers to a gene encoding a MAGOHB mRNA or polypeptide. The MAGOHB gene encodes the protein mago nashi homolog 2 protein. MAGOHB is also known as mago, magoh, AND MGN2. In some embodiments, a MAGOHB gene is a human MAGOHB gene. An exemplary MAGOHB gene is represented by NCBI Gene ID No. 55110. Exemplary MAGOHB transcript sequences are represented by NCBI Ref. Seq. NM_018048 and provided herein as SEQ ID NO: 129. Exemplary amino acid sequences of a MAGOHB polypeptide are represented by NCBI Ref. Seq. NP_060518 and provided herein as SEQ ID NO: 222.

[0175] As used herein “MAMDC4” refers to a gene encoding a MAMDC4 mRNA or polypeptide. The MAMDC4 gene encodes the apical endosomal glycoprotein protein. MAMDC4 is also known as AEGP and EDTB. In some embodiments, a MAMDC4 gene is a human MAMDC4 gene. An exemplary MAMDC4 gene is represented by NCBI Gene ID No. 158056. Exemplary MAMDC4 transcript sequences are represented by NCBI Ref. Seq. NM_206920 and provided herein as SEQ ID NO: 130. Exemplary amino acid sequences of a MAMDC4 polypeptide are represented by NCBI Ref. Seq. NP_996803 and provided herein as SEQ ID NO: 223.

[0176] As used herein “MANBA” refers to a gene encoding a MANBA mRNA or polypeptide. The MANBA gene encodes the beta-mannosidase protein. MANBA is also known as MANB1. In some embodiments, a MANBA gene is a human MANBA gene. An exemplary MANBA gene is represented by NCBI Gene ID No. 4126. Exemplary MANBA transcript sequences are represented by NCBI Ref. Seq. NM_005908 and provided herein as SEQ ID NO: 131. Exemplary amino acid sequences of a MANBA polypeptide are represented by NCBI Ref. Seq. NP_005899 and provided herein as SEQ ID NO: 224.

[0177] As used herein “MAP3K9” refers to a gene encoding a MAP3K9 mRNA or polypeptide. The MAP3K9 gene encodes the mitogen-activated protein kinase kinase kinase 9 protein. MAP3K9 is also known as MEKK9, MLK1, and PRKE1. In some embodiments, a MAP3K9 gene is a human MAP3K9 gene. An exemplary MAP3K9 gene is represented by NCBI Gene ID No. 4293. Exemplary MAP3K9 transcript sequences are represented by NCBI Ref. Seq. NM_033141 and provided herein as SEQ ID NO: 132. Exemplary amino acid sequences of a MAP3K9 polypeptide are represented by NCBI Ref. Seq. NP_149132 and provided herein as SEQ ID NO: 225.

[0178] As used herein “MED13L” refers to a gene encoding a MED13L mRNA or polypeptide. The MED13L gene encodes the mediator of RNA polymerase II transcription subunit 13-likeprotein. MED13L is also known as MRFACD, PROSIT240, THRAP2 and TRAP240L. In some embodiments, a MED13L gene is a human MED13L gene. An exemplary MED13L gene is represented by NCBI Gene ID No. 23389. Exemplary MED13L transcript sequences are represented by NCBI Ref. Seq. NM_015335 and provided herein as SEQ ID NO: 133. Exemplary amino acid sequences of a MED13L polypeptide are represented by NCBI Ref. Seq. NP_056150 and provided herein as SEQ ID NO: 226.

[0179] As used herein “METTL25” refers to a gene encoding a METTL25 mRNA or polypeptide. The METTL25 gene encodes the probable methyltransferase-like protein 25 protein. METTL25 is also known as C12orf26. In some embodiments, a METTL25 gene is a human METTL25 gene. An exemplary METTL25 gene is represented by NCBI Gene ID No. 84190. Exemplary METTL25 transcript sequences are represented by NCBI Ref. Seq. NM_032230 and provided herein as SEQ ID NO: 134. Exemplary amino acid sequences of a METTL25 polypeptide are represented by NCBI Ref. Seq. NP_115606 and provided herein as SEQ ID NO: 227.

[0180] As used herein “MTBP” refers to a gene encoding a MTBP mRNA or polypeptide. The MTBP gene encodes the mdm2-binding protein protein. MTBP is also known as MDM2BP. In some embodiments, a MTBP gene is a human MTBP gene. An exemplary MTBP gene is represented by NCBI Gene ID No. 27085. Exemplary MTBP transcript sequences are represented by NCBI Ref. Seq. NM_022045 and provided herein as SEQ ID NO: 135. Exemplary amino acid sequences of a MTBP polypeptide are represented by NCBI Ref. Seq. NP_071328 and provided herein as SEQ ID NO: 228.

[0181] As used herein “MYH10” refers to a gene encoding a MYH10 mRNA or polypeptide. The MYH10 gene encodes the myosin-10 protein. MYH10 is also known as NMMHC-IIB and NMMHCB. In some embodiments, a MYH10 gene is a human MYH10 gene. An exemplary MYH10 gene is represented by NCBI Gene ID No. 4628. Exemplary MYH10 transcript sequences are represented by NCBI Ref. Seq. NM_005964 and provided herein as SEQ ID NO: 136. Exemplary amino acid sequences of a MYH10 polypeptide are represented by NCBI Ref. Seq. NP_005955 and provided herein as SEQ ID NO: 229.

[0182] As used herein “MYOSC” refers to a gene encoding a MYO5C mRNA or polypeptide. The MYO5C gene encodes the unconventional myosin-Vc protein. In some embodiments, a MYO5C gene is a human MYO5C gene. An exemplary MYO5C gene is represented by NCBI Gene ID No. 55930-Exemplary MYO5C transcript sequences are represented by NCBI Ref. Seq. NM_018728 and provided herein as SEQ ID NO: 137. Exemplary amino acid sequences of a MYO5C polypeptide are represented by NCBI Ref. Seq. NP_061198 and provided herein as SEQ ID NO: 230.

[0183] As used herein “NFIA” refers to a gene encoding a NFIA mRNA or polypeptide. The NFIA gene encodes the nuclear factor 1 A-type protein. NFIA is also known as BRMUTD, CTF, NF-I/A, NF1-A, NFI-A, and NFI-L. In some embodiments, a NFIA gene is a human NFIA gene. An exemplary NFIA gene is represented by NCBI Gene ID No. 4774. Exemplary NFIA transcript sequences are represented by NCBI Ref. Seq. NM_005595 and provided herein as SEQ ID NO: 138. Exemplary amino acid sequences of a NFIA polypeptide are represented by NCBI Ref. Seq. NP_005586 and provided herein as SEQ ID NO: 231.

[0184] As used herein “NINJ2” refers to a gene encoding a NINJ2 mRNA or polypeptide. The NINJ2 gene encodes the ninjurin-2 protein. In some embodiments, a NINJ2 gene is a human NINJ2 gene. An exemplary NINJ2 gene is represented by NCBI Gene ID No. 4815. Exemplary NINJ2 transcript sequences are represented by NCBI Ref. Seq. NM_016533 and provided herein as SEQ ID NO: 139. Exemplary amino acid sequences of a NINJ2 polypeptide are represented by NCBI Ref. Seq. NP_057617 and provided herein as SEQ ID NO: 232.

[0185] As used herein “OPRM1” refers to a gene encoding a OPRM1 mRNA or polypeptide. The OPRM1 gene encodes a mu-type opioid receptor protein. OPRM1 is also known as LMOR, M-OR-1, MOP, MOR, MOR1, and OPRM. In some embodiments, a OPRM1 gene is a human OPRM1 gene. An exemplary OPRM1 gene is represented by NCBI Gene ID No. 4988. Exemplary OPRM1 transcript sequences are represented by NCBI Ref. Seq. NM_001008503 and provided herein as SEQ ID NO: 140. Exemplary amino acid sequences of a OPRM1 polypeptide are represented by NCBI Ref. Seq. NP_001008503 and provided herein as SEQ ID NO: 233.

[0186] As used herein “OTX1” refers to a gene encoding a OTX1 mRNA or polypeptide. The OTX1 gene encodes the homeobox protein OTX1 protein. In some embodiments, a OTX1 gene is a human OTX1 gene. An exemplary OTX1 gene is represented by NCBI Gene ID No. 5013. Exemplary OTX1 transcript sequences are represented by NCBI Ref. Seq. NM_014562 and provided herein as SEQ ID NO: 141. Exemplary amino acid sequences of a OTX1 polypeptide are represented by NCBI Ref. Seq. NP_055377 and provided herein as SEQ ID NO: 234.

[0187] As used herein “PAQR4” refers to a gene encoding a PAQR4 mRNA or polypeptide. The PAQR4 gene encodes the progestin and adipoQ receptor family member 4 protein. In some embodiments, a PAQR4 gene is a human PAQR4 gene. An exemplary PAQR4 gene is represented by NCBI Gene ID No. 124222. Exemplary PAQR4 transcript sequences are represented by NCBI Ref. Seq. NM_152341 and provided herein as SEQ ID NO: 142. Exemplary amino acid sequences of a PAQR4 polypeptide are represented by NCBI Ref. Seq. NP_689554 and provided herein as SEQ ID NO: 235.

[0188] As used herein “PDCD10” refers to a gene encoding a PDCD10 mRNA or polypeptide. The PDCD10 gene encodes the programmed cell death protein 10 protein. PDCD10 is also known as CCM3 and TFAR15. In some embodiments, a PDCD10 gene is a human PDCD10 gene. An exemplary PDCD10 gene is represented by NCBI Gene ID No. 11235. Exemplary PDCD10 transcript sequences are represented by NCBI Ref. Seq. NM_007217 and provided herein as SEQ ID NO: 143. Exemplary amino acid sequences of a PDCD10 polypeptide are represented by NCBI Ref. Seq. NP_009148 and provided herein as SEQ ID NO: 236.

[0189] As used herein “PDE3A” refers to a gene encoding a PDE3A mRNA or polypeptide. The PDE3A gene encodes the cGMP-inhibited 3′, 5′-cyclic phosphodiesterase A protein. PDE3A is also known as CGI-PDE, CGI-PDE A, CGI-PDE-A, and HTNB. In some embodiments, a PDE3A gene is a human PDE3A gene. An exemplary PDE3A gene is represented by NCBI Gene ID No. 5139. Exemplary PDE3A transcript sequences are represented by NCBI Ref. Seq. NM_000921 and provided herein as SEQ ID NO: 144. Exemplary amino acid sequences of a PDE3A polypeptide are represented by NCBI Ref. Seq. NP_000912 and provided herein as SEQ ID NO: 237.

[0190] As used herein “PELI1” refers to a gene encoding a PELI1 mRNA or polypeptide. The PELI1 gene encodes the E3 ubiquitin-protein ligase pellino homolog 1 protein. In some embodiments, a PELI1 gene is a human PELI1 gene. An exemplary PELI1 gene is represented by NCBI Gene ID No. 57162. Exemplary PELI1 transcript sequences are represented by NCBI Ref. Seq. NM_020651 and provided herein as SEQ ID NO: 145. Exemplary amino acid sequences of a PELI1 polypeptide are represented by NCBI Ref. Seq. NP_065702 and provided herein as SEQ ID NO: 238.

[0191] As used herein “PLEC” refers to a gene encoding a PLEC mRNA or polypeptide. The PLEC gene encodes a plectin protein. PLEC is also known as: EBS1; EBS5A; EBS5B; EBS5C; EBS5D; EBSMD; EBSND; EBSO; EBSOG; EBSPA; HD1; LGMD2Q; LGMDR17; PCN; PLEC1; PLEC1b; and PLTN. In some embodiments, a PLEC gene is a human PLEC gene. An exemplary PLEC gene is represented by NCBI Gene ID No. 5339. Exemplary PLEC transcript sequences are represented by NCBI Ref. Seq. NM_000445 and provided herein as SEQ ID NO: 146. Exemplary amino acid sequences of a PLEC polypeptide are represented by NCBI Ref. Seq. NP_000436 and provided herein as SEQ ID NO: 239.

[0192] As used herein “PTGER4” refers to a gene encoding a PTGER4 mRNA or polypeptide. The PTGER4 gene encodes the prostaglandin E2 receptor EP4 subtype protein. PTGER4 is also known as EP4 and EP4R. In some embodiments, a PTGER4 gene is a human PTGER4 gene. An exemplary PTGER4 gene is represented by NCBI Gene ID No. 5734. Exemplary PTGER4 transcript sequences are represented by NCBI Ref. Seq. NM_000958 and provided herein as SEQ ID NO: 147. Exemplary amino acid sequences of a PTGER4 polypeptide are represented by NCBI Ref. Seq. NP_000949 and provided herein as SEQ ID NO: 240.

[0193] As used herein “PTPRJ” refers to a gene encoding a PTPRJ mRNA or polypeptide. The PTPRJ gene encodes a receptor-type tyrosine-protein phosphatase eta protein. PTPRJ is also known as: CD148; DEP1; HPTPeta; R-PTP-ETA; and SCC1. In some embodiments, a PTPRJ gene is a human PTPRJ gene. An exemplary PTPRJ gene is represented by NCBI Gene ID No. 5795-Exemplary PTPRJ transcript sequences are represented by NCBI Ref. Seq. NM_002843 and provided herein as SEQ ID NO: 148. Exemplary amino acid sequences of a PTPRJ polypeptide are represented by NCBI Ref. Seq. NP_002834 and provided herein as SEQ ID NO: 241.

[0194] As used herein “QKI” refers to a gene encoding a QKI mRNA or polypeptide. The QKI gene encodes protein quaking. QKI is also known as: Hqk; hqkI; QK; QK1; and QK3. In some embodiments, a QKI gene is a human QKI gene. An exemplary QKI gene is represented by NCBI Gene ID No. 9444. Exemplary QKI transcript sequences are represented by NCBI Ref. Seq. NM_006775 and provided herein as SEQ ID NO: 149. Exemplary amino acid sequences of a QKI polypeptide are represented by NCBI Ref. Seq. NP_006766 and provided herein as SEQ ID NO: 242.

[0195] As used herein “RPS6KA5” refers to a gene encoding a RPS6KA5 mRNA or polypeptide. The RPS6KA5 gene encodes a ribosomal protein S6 kinase alpha-5. RPS6KA5 is also known as: MSK1; MSPK1; and RLPK. In some embodiments, a RPS6KA5 gene is a human RPS6KA5 gene. An exemplary RPS6KA5 gene is represented by NCBI Gene ID No. 9252. Exemplary RPS6KA5 transcript sequences are represented by NCBI Ref. Seq. NM_004755 and provided herein as SEQ ID NO: 152. Exemplary amino acid sequences of a RPS6KA5 polypeptide are represented by NCBI Ref. Seq. NP_004746 and provided herein as SEQ ID NO: 245.

[0196] As used herein “SASH1” refers to a gene encoding a SASH1 mRNA or polypeptide. The SASH1 gene encodes a SAM and SH3 domain-containing protein 1. SASH1 is also known as: CAPOK; dJ323M4.1; DUH1; and SH3D6A. In some embodiments, a SASH1 gene is a human SASH1 gene. An exemplary SASH1 gene is represented by NCBI Gene ID No. 23328. Exemplary SASH1 transcript sequences are represented by NCBI Ref. Seq. NM_015278 and provided herein as SEQ ID NO: 153. Exemplary amino acid sequences of a SASH1 polypeptide are represented by NCBI Ref. Seq. NP_056093 and provided herein as SEQ ID NO: 246.

[0197] As used herein “SEC16B” refers to a gene encoding a SEC16B mRNA or polypeptide. The SEC16B gene encodes a protein transport protein. SEC16B is also known as: LZTR2; PGPR-p117; RGPR; RGPR-p117; and SEC16S. In some embodiments, a SEC16B gene is a human SEC16B gene. An exemplary SEC16B gene is represented by NCBI Gene ID No. 89866. Exemplary SEC16B transcript sequences are represented by NCBI Ref. Seq. NM_033127 and provided herein as SEQ ID NO: 154. Exemplary amino acid sequences of a SEC16B polypeptide are represented by NCBI Ref. Seq. NP_149118 and provided herein as SEQ ID NO: 247.

[0198] As used herein “SKAP1” refers to a gene encoding a SKAP1 mRNA or polypeptide. The SKAP1 gene encodes a src kinase-associated phosphoprotein 1. SKAP1 is also known as: HEL-S-81p; SCAP1; and SKAP55. In some embodiments, a SKAP1 gene is a human SKAP1 gene. An exemplary SKAP1 gene is represented by NCBI Gene ID No. 8631. Exemplary SKAP1 transcript sequences are represented by NCBI Ref. Seq. NM_003726 and provided herein as SEQ ID NO: 156. Exemplary amino acid sequences of a SKAP1 polypeptide are represented by NCBI Ref. Seq. NP_003717 and provided herein as SEQ ID NO: 249.

[0199] As used herein “SLC25A13” refers to a gene encoding a SLC25A13 mRNA or polypeptide. The SLC25A13 gene encodes a calcium-binding mitochondrial carrier protein Aralar2. SLC25A13 is also known as: ARALAR2; CITRIN; CTLN2; and NICCD. In some embodiments, a SLC25A13 gene is a human SLC25A13 gene. An exemplary SLC25A13 gene is represented by NCBI Gene ID No. 10165. Exemplary SLC25A13 transcript sequences are represented by NCBI Ref. Seq. NM_014251 and provided herein as SEQ ID NO: 158. Exemplary amino acid sequences of a SLC25A13 polypeptide are represented by NCBI Ref. Seq. NP_055066 and provided herein as SEQ ID NO: 251.

[0200] As used herein “SLC30A6” refers to a gene encoding a SLC30A6 mRNA or polypeptide. The SLC30A6 gene encodes a zinc transporter 6 protein. SLC30A6 is also known as: MST103; MSTP103; and ZNT6. In some embodiments, a SLC30A6 gene is a human SLC30A6 gene. An exemplary SLC30A6 gene is represented by NCBI Gene ID No. 55676. Exemplary SLC30A6 transcript sequences are represented by NCBI Ref. Seq. NM_017964 and provided herein as SEQ ID NO: 159. Exemplary amino acid sequences of a SLC30A6 polypeptide are represented by NCBI Ref. Seq. NP_060434 and provided herein as SEQ ID NO: 252.

[0201] As used herein “SNX17” refers to a gene encoding a SNX17 mRNA or polypeptide. The SNX17 gene encodes a sorting nexin-17 protein. In some embodiments, a SNX17 gene is a human SNX17 gene. An exemplary SNX17 gene is represented by NCBI Gene ID No. 9784. Exemplary SNX17 transcript sequences are represented by NCBI Ref. Seq. NM_014748 and provided herein as SEQ ID NO: 161. Exemplary amino acid sequences of a SNX17 polypeptide are represented by NCBI Ref. Seq. NP_055563 and provided herein as SEQ ID NO: 254.

[0202] As used herein “SOX13” refers to a gene encoding a SOX13 mRNA or polypeptide. The SOX13 gene encodes a transcription factor. SOX13 is also known as: ICA12 and Sox-13. In some embodiments, a SOX13 gene is a human SOX13 gene. An exemplary SOX13 gene is represented by NCBI Gene ID No. 9580. Exemplary SOX13 transcript sequences are represented by NCBI Ref. Seq. NM_005686 and provided herein as SEQ ID NO: 162. Exemplary amino acid sequences of a SOX13 polypeptide are represented by NCBI Ref. Seq. NP_005677 and provided herein as SEQ ID NO: 255.

[0203] As used herein “SRSF7” refers to a gene encoding a SRSF7 mRNA or polypeptide. The SRSF7 gene encodes a serine/arginine-rich splicing factor 7. SRSF7 is also known as: 9G8; AAG3; and SFRS7. In some embodiments, a SRSF7 gene is a human SRSF7 gene. An exemplary SRSF7 gene is represented by NCBI Gene ID No. 6432. Exemplary SRSF7 transcript sequences are represented by NCBI Ref. Seq. NM_001031684 and provided herein as SEQ ID NO: 163. Exemplary amino acid sequences of a SRSF7 polypeptide are represented by NCBI Ref. Seq. NP_001026854 and provided herein as SEQ ID NO: 256.

[0204] As used herein “TANGO6” refers to a gene encoding a TANGO6 mRNA or polypeptide. The TANGO6 gene encodes a transport and Golgi organization protein 6. TANGO6 is also known as: TMCO7. In some embodiments, a TANGO6 gene is a human TANGO6 gene. An exemplary TANGO6 gene is represented by NCBI Gene ID No. 79613. Exemplary TANGO6 transcript sequences are represented by NCBI Ref. Seq. NM_024562 and provided herein as SEQ ID NO: 164. Exemplary amino acid sequences of a TANGO6 polypeptide are represented by NCBI Ref. Seq. NP_078838 and provided herein as SEQ ID NO: 257.

[0205] As used herein “TG” refers to a gene encoding a TG mRNA or polypeptide. The TG gene encodes a thyroglobulin precursor. TG is also known as: AITD3 and TGN. In some embodiments, a TG gene is a human TG gene. An exemplary TG gene is represented by NCBI Gene ID No. 7038. Exemplary TG transcript sequences are represented by NCBI Ref. Seq. NM_003235 and provided herein as SEQ ID NO: 165. Exemplary amino acid sequences of a TG polypeptide are represented by NCBI Ref. Seq. NP_003226 and provided herein as SEQ ID NO: 258.

[0206] As used herein “TMCO3” refers to a gene encoding a TMCO3 mRNA or polypeptide. The TMCO3 gene encodes a transmembrane and coiled-coil domain-containing protein 3. TMCO3 is also known as: C13orf11. In some embodiments, a TMCO3 gene is a human TMCO3 gene. An exemplary TMCO3 gene is represented by NCBI Gene ID No. 55002. Exemplary TMCO3 transcript sequences are represented by NCBI Ref. Seq. NM_017905 and provided herein as SEQ ID NO: 166. Exemplary amino acid sequences of a TMCO3 polypeptide are represented by NCBI Ref. Seq. NP_060375 and provided herein as SEQ ID NO: 259.

[0207] As used herein “TNS3” refers to a gene encoding a TNS3 mRNA or polypeptide. The TNS3 gene encodes a tensin-3 protein. TNS3 is also known as: TEM6 and TENS1. In some embodiments, a TNS3 gene is a human TNS3 gene. An exemplary TNS3 gene is represented by NCBI Gene ID No. 64759. Exemplary TNS3 transcript sequences are represented by NCBI Ref. Seq. NM_022748 and provided herein as SEQ ID NO: 167. Exemplary amino acid sequences of a TNS3 polypeptide are represented by NCBI Ref. Seq. NP_073585 and provided herein as SEQ ID NO: 260.

[0208] As used herein “TRIM24” refers to a gene encoding a TRIM24 mRNA or polypeptide. The TRIM24 gene encodes a transcription intermediary factor 1-alpha. TRIM24 is also known as: hTIF1; PTC6; RNF82; TF1A; TIF1; TIF1A; and TIF1 ALPHA. In some embodiments, a TRIM24 gene is a human TRIM24 gene. An exemplary TRIM24 gene is represented by NCBI Gene ID No. 8805. Exemplary TRIM24 transcript sequences are represented by NCBI Ref. Seq. NM_003852 and provided herein as SEQ ID NO: 169. Exemplary amino acid sequences of a TRIM24 polypeptide are represented by NCBI Ref. Seq. NP_003843 and provided herein as SEQ ID NO: 262.

[0209] As used herein “TTC28” refers to a gene encoding a TTC28 mRNA or polypeptide. The TTC28 gene encodes a tetratricopeptide repeat protein 28. TTC28 is also known as: TPRBK. In some embodiments, a TTC28 gene is a human TTC28 gene. An exemplary TTC28 gene is represented by NCBI Gene ID No. 23331. Exemplary TTC28 transcript sequences are represented by NCBI Ref. Seq. NM_001145418 and provided herein as SEQ ID NO: 170. Exemplary amino acid sequences of a TTC28 polypeptide are represented by NCBI Ref. Seq. NP_001138890 and provided herein as SEQ ID NO: 263.

[0210] As used herein “UBE2L3” refers to a gene encoding a UBE2L3 mRNA or polypeptide. The UBE2L3 gene encodes an ubiquitin-conjugating enzyme E2 L3. UBE2L3 is also known as: E2-F1; L-UBC; UBCH7; and UbcM4. In some embodiments, a UBE2L3 gene is a human UBE2L3 gene. An exemplary UBE2L3 gene is represented by NCBI Gene ID No. 7332. Exemplary UBE2L3 transcript sequences are represented by NCBI Ref. Seq. NM_003347 and provided herein as SEQ ID NO: 172. Exemplary amino acid sequences of a UBE2L3 polypeptide are represented by NCBI Ref. Seq. NP_003338 and provided herein as SEQ ID NO: 265.

[0211] As used herein “UBE3B” refers to a gene encoding a UBE3B mRNA or polypeptide. The UBE3B gene encodes an ubiquitin-protein ligase E3B. UBE3B is also known as: BPIDS and KOS. In some embodiments, a UBE3B gene is a human UBE3B gene. An exemplary UBE3B gene is represented by NCBI Gene ID No. 89910. Exemplary UBE3B transcript sequences are represented by NCBI Ref. Seq. NM_130466 and provided herein as SEQ ID NO: 173. Exemplary amino acid sequences of a UBE3B polypeptide are represented by NCBI Ref. Seq. NP_569733 and provided herein as SEQ ID NO: 266.

[0212] As used herein “UTRN” refers to a gene encoding a UTRN mRNA or polypeptide. The UTRN gene encodes an utrophin protein. UTRN is also known as: DMDL; DRP; and DRP1. In some embodiments, a UTRN gene is a human UTRN gene. An exemplary UTRN gene is represented by NCBI Gene ID No. 7402. Exemplary UTRN transcript sequences are represented by NCBI Ref. Seq. NM_007124 and provided herein as SEQ ID NO: 174. Exemplary amino acid sequences of a UTRN polypeptide are represented by NCBI Ref. Seq. NP_009055 and provided herein as SEQ ID NO: 267.

[0213] As used herein “VASP” refers to a gene encoding a VASP mRNA or polypeptide. The VASP gene encodes a vasodilator-stimulated phosphoprotein. In some embodiments, a VASP gene is a human VASP gene. An exemplary VASP gene is represented by NCBI Gene ID No. 7408. Exemplary VASP transcript sequences are represented by NCBI Ref. Seq. NM_003370 and provided herein as SEQ ID NO: 175. Exemplary amino acid sequences of a VASP polypeptide are represented by NCBI Ref. Seq. NP_003361 and provided herein as SEQ ID NO: 268.

[0214] As used herein “WDR92” refers to a gene encoding a WDR92 mRNA or polypeptide. The WDR92 gene encodes a dynein axonemal assembly factor 10. WDR92 is also known as: DNAAF10. In some embodiments, a WDR92 gene is a human WDR92 gene. An exemplary WDR92 gene is represented by NCBI Gene ID No. 116143. Exemplary WDR92 transcript sequences are represented by NCBI Ref. Seq. NM_138458 and provided herein as SEQ ID NO: 176. Exemplary amino acid sequences of a WDR92 polypeptide are represented by NCBI Ref. Seq. NP_612467 and provided herein as SEQ ID NO: 269.

[0215] As used herein “YPEL5” refers to a gene encoding an YPEL5 mRNA or polypeptide. The YPEL5 gene encodes a protein yippee-like 5. YPEL5 is also known as: CGI-127. In some embodiments, an YPEL5 gene is a human YPEL5 gene. An exemplary YPEL5 gene is represented by NCBI Gene ID No. 51646. Exemplary YPEL5 transcript sequences are represented by NCBI Ref. Seq. NM_016061 and provided herein as SEQ ID NO: 177. Exemplary amino acid sequences of an YPEL5 polypeptide are represented by NCBI Ref. Seq. NP_057145 and provided herein as SEQ ID NO: 270.

[0216] As used herein “ZNF446” refers to a gene encoding a ZNF446 mRNA or polypeptide. The ZNF446 gene encodes a zinc finger protein 446. ZNF446 is also known as: ZKSCAN20; ZSCAN30; and ZSCAN52. In some embodiments, a ZNF446 gene is a human ZNF446 gene. An exemplary ZNF446 gene is represented by NCBI Gene ID No. 55663. Exemplary ZNF446 transcript sequences are represented by NCBI Ref. Seq. NM_017908 and provided herein as SEQ ID NO: 178. Exemplary amino acid sequences of a ZNF446 polypeptide are represented by NCBI Ref. Seq. NP_060378 and provided herein as SEQ ID NO: 271.

[0217] As used herein “ZNF454” refers to a gene encoding a ZNF454 mRNA or polypeptide. The ZNF454 gene encodes a zinc finger protein 454. In some embodiments, a ZNF454 gene is a human ZNF454 gene. An exemplary ZNF454 gene is represented by NCBI Gene ID No. 285676. Exemplary ZNF454 transcript sequences are represented by NCBI Ref. Seq. NM_182594 and provided herein as SEQ ID NO: 179. Exemplary amino acid sequences of a ZNF454 polypeptide are represented by NCBI Ref. Seq. NP_872400 and provided herein as SEQ ID NO: 272.

[0218] As used herein “ZNF513” refers to a gene encoding a ZNF513 mRNA or polypeptide. The ZNF513 gene encodes a zinc finger protein 513. ZNF513 is also known as: HMFT0656; RP58; and Zfp513. In some embodiments, a ZNF513 gene is a human ZNF513 gene. An exemplary ZNF513 gene is represented by NCBI Gene ID No. 130557. Exemplary ZNF513 transcript sequences are represented by NCBI Ref. Seq. NM_144631 and provided herein as SEQ ID NO: 180. Exemplary amino acid sequences of a ZNF513 polypeptide are represented by NCBI Ref. Seq. NP_653232 and provided herein as SEQ ID NO: 273.

[0219] As used herein “ZSWIM2” refers to a gene encoding a ZSWIM2 mRNA or polypeptide. The ZSWIM2 gene encodes an E3 ubiquitin-protein ligase. ZSWIM2 is also known as: MEX and ZZZ2. In some embodiments, a ZSWIM2 gene is a human ZSWIM2 gene. An exemplary ZSWIM2 gene is represented by NCBI Gene ID No. 151112. Exemplary ZSWIM2 transcript sequences are represented by NCBI Ref. Seq. NM_182521 and provided herein as SEQ ID NO: 181. Exemplary amino acid sequences of a ZSWIM2 polypeptide are represented by NCBI Ref. Seq. NP_872327 and provided herein as SEQ ID NO: 274.

### (i) Exemplary ALK Fusion Nucleic Acid Molecules

[0220] In some aspects, provided herein are ALK fusion nucleic acid molecules comprising at least a portion of an ALK gene fused to at least a portion of another gene.

[0221] In some embodiments, an ALK fusion nucleic acid molecule of the disclosure comprises at least a portion of ALK and at least a portion of an ABCB11, ACTN4, AGAP1, APH1A, AZI2, BTBD9, C2orf73, CAPN14, CARMIL1, CASP8, CDC42BPA, CIB4, CNTNAP5, COL3A1, CPQ, CPSF7, CREBBP, CTBP1, CTNND1, CYP51A1, CYS1, EPHA2, FHOD3, FILIP1L, GMCL1, GPN1, GPR113, HADHA, HS1BP3, INTS9, ITGA6, KCTD18, KIF5C, KLC4, LINC00535, LRRFIP2, MAGOHB, MAMDC4, MANBA, MAP3K9, MED13L, METTL25, MTBP, MYH10, MYO5C, NFIA, NINJ2, OPRM1, OTX1, PAQR4, PDCD10, PDE3A, PELI1, PLEC, PTGER4, PTPRJ, QKI, RPS6KA5, SASH1, SEC16B, SKAP1, SLC25A13, SLC30A6, SNX17, SOX13, SRSF7, TANGO6, TG, TMCO3, TNS3, TRIM24, TTC28, UBE2L3, UBE3B, UTRN, VASP, WDR92, YPEL5, ZNF446, ZNF454, ZNF513, or ZSWIM2 gene, or a gene listed in Table 1.

TABLE 1
Gene fusion partners.

| | | | | | | |
|---|---|---|---|---|---|---|
| ABCB11 | COL3A1 | GPR113 | MAP3K9 | PELI1 | SRSF7 | ZNF446 |
| ACTN4 | CPQ | HADHA | MED13L | PLEC | TANGO6 | ZNF454 |
| AGAP1 | CPSF7 | HS1BP3 | METTL25 | PTGER4 | TG | ZNF513 |
| APH1A | CREBBP | INTS9 | MTBP | PTPRJ | TMCO3 | ZSWIM2 |
| AZI2 | CTBP1 | ITGA6 | MYH10 | QKI | TNS3 | |
| BTBD9 | CTNND1 | KCTD18 | MYO5C | RPS6KA5 | TRIM24 | |
| C2orf73 | CYP51A1 | KIF5C | NFIA | SASH1 | TTC28 | |
| CAPN14 | CYS1 | KLC4 | NINJ2 | SEC16B | UBE2L3 | |
| CARMIL1 | EPHA2 | LINC00535 | OPRM1 | SKAP1 | UBE3B | |
| CASP8 | FHOD3 | LRRFIP2 | OTX1 | SLC25A13 | UTRN | |
| CDC42BPA | FILIP1L | MAGOHB | PAQR4 | SLC30A6 | VASP | |
| CIB4 | GMCL1 | MAMDC4 | PDCD10 | SNX17 | WDR92 | |
| CNTNAP5 | GPN1 | MANBA | PDE3A | SOX13 | YPEL5 | |

[0222] For example, in some embodiments, the ALK fusion nucleic acid molecule is selected from an ALK-ABCB11, ALK-ACTN4, ALK-AGAP1, ALK-APH1A, ALK-AZI2, ALK-BTBD9, ALK-C2orf73, ALK-CAPN14, ALK-CARMIL1, ALK-CASP8, ALK-CDC42BPA, ALK-CIB4, ALK-CNTNAP5, ALK-COL3A1, ALK-CPQ, ALK-CPSF7, ALK-CREBBP, ALK-CTBP1, ALK-CTNND1, ALK-CYP51A1, ALK-CYS1, ALK-EPHA2, ALK-FHOD3, ALK-FILIP1L, ALK-GMCL1, ALK-GPN1, ALK-GPR113, ALK-HADHA, ALK-HS1BP3, ALK-INTS9, ALK-ITGA6, ALK-KCTD18, ALK-KIF5C, ALK-KLC4, ALK-LINC00535, ALK-LRRFIP2, ALK-MAGOHB, ALK-MAMDC4, ALK-MANBA, ALK-MAP3K9, ALK-MED13L, ALK-METTL25, ALK-MTBP, ALK-MYH10, ALK-MYO5C, ALK-NFIA, ALK-NINJ2, ALK-OPRM1, ALK-OTX1, ALK-PAQR4, ALK-PDCD10, ALK-PDE3A, ALK-PELI1, ALK-PLEC, ALK-PTGER4, ALK-PTPRJ, ALK-QKI, ALK-RPS6KA5, ALK-SASH1, ALK-SEC16B, ALK-SKAP1, ALK-SLC25A13, ALK-SLC30A6, ALK-SNX17, ALK-SOX13, ALK-SRSF7, ALK-TANGO6, ALK-TG, ALK-TMCO3, ALK-TNS3, ALK-TRIM24, ALK-TTC28, ALK-UBE2L3, ALK-UBE3B, ALK-UTRN, ALK-VASP, ALK-WDR92, ALK-YPEL5, ALK-ZNF446, ALK-ZNF454, ALK-ZNF513, or ALK-ZSWIM2 fusion nucleic acid molecule.

[0223] In some embodiments, the ALK fusion nucleic acid molecule of the disclosure comprises at least a portion of an ALK gene and at least a portion of an ABCB11, ACTN4, AGAP1, APH1A, AZI2, BTBD9, C2orf73, CAPN14, CARMIL1, CASP8, CDC42BPA, CIB4, CNTNAP5, COL3A1, CPQ, CPSF7, CREBBP, CTBP1, CTNND1, CYP51A1, CYS1, EPHA2, FHOD3, FILIP1L, GMCL1, GPN1, GPR113, HADHA, HS1BP3, INTS9, ITGA6, KCTD18, KIF5C, KLC4, LINC00535, LRRFIP2, MAGOHB, MAMDC4, MANBA, MAP3K9, MED13L, METTL25, MTBP, MYH10, MYO5C, NFIA, NINJ2, OPRM1, OTX1, PAQR4, PDCD10, PDE3A, PELI1, PLEC, PTGER4, PTPRJ, QKI, RPS6KA5, SASH1, SEC16B, SKAP1, SLC25A13, SLC30A6, SNX17, SOX13, SRSF7, TANGO6, TG, TMCO3, TNS3, TRIM24, TTC28, UBE2L3, UBE3B, UTRN, VASP, WDR92, YPEL5, ZNF446, ZNF454, ZNF513, or ZSWIM2 gene, wherein the order of the genes in the fusion in the 5′ to 3′ direction is as indicated in Table 2.

TABLE 2
Order of fused genes in exemplary
ALK fusion nucleic acid molecules.

| ALK Fusion Nucleic Acid | | |
|---|---|---|
| Molecule | 5′ Gene | 3′ Gene |
| ALK-COL3A1 | COL3A1 | ALK |
| ALK-CDC42BPA | CDC42BPA | ALK |
| ALK-EPHA2 | EPHA2 | ALK |
| ALK-MYO5C | MYO5C | ALK |
| ALK-TRIM24 | TRIM24 | ALK |
| ALK-SKAP1 | SKAP1 | ALK |
| ALK-UBE3B | UBE3B | ALK |
| ALK-TNS3 | TNS3 | ALK |
| ALK-C2orf73 | C2orf73 | ALK |
| ALK-AZI2 | AZI2 | ALK |
| ALK-MANBA | MANBA | ALK |
| ALK-CNTNAP5 | CNTNAP5 | ALK |
| ALK-TANGO6 | TANGO6 | ALK |
| ALK-NFIA | NFIA | ALK |
| ALK-RPS6KA5 | RPS6KA5 | ALK |
| ALK-TG | TG | ALK |
| ALK-LRRFIP2 | LRRFIP2 | ALK |
| ALK-MYO5C | MYO5C | ALK |
| ALK-AGAP1 | AGAP1 | ALK |
| ALK-MED13L | ALK | MED13L |
| ALK-MTBP | ALK | MTBP |
| ALK-SLC30A6 | ALK | SLC30A6 |
| ALK-GMCL1 | ALK | GMCL1 |
| ALK-AGAP1 | ALK | AGAP1 |
| ALK-ZNF454 | ALK | ZNF454 |
| ALK-TTC28 | TTC28 | ALK |
| ALK-NINJ2 | NINJ2 | ALK |
| ALK-UTRN | UTRN | ALK |
| ALK-ACTN4 | ACTN4 | ALK |
| ALK-CPSF7 | CPSF7 | ALK |
| ALK-SLC25A13 | SLC25A13 | ALK |
| ALK-CTNND1 | CTNND1 | ALK |
| ALK-KLC4 | KLC4 | ALK |
| ALK-BTBD9 | BTBD9 | ALK |
| ALK-CPQ | CPQ | ALK |
| ALK-KIF5C | KIF5C | ALK |
| ALK-MAGOHB | MAGOHB | ALK |
| ALK-COL3A1 | COL3A1 | ALK |
| ALK-OPRM1 | OPRM1 | ALK |
| ALK-GPN1 | GPN1 | ALK |
| ALK-SEC16B | SEC16B | ALK |
| ALK-UBE2L3 | UBE2L3 | ALK |
| ALK-METTL25 | METTL25 | ALK |
| ALK-CYS1 | CYS1 | ALK |
| ALK-ABCB11 | ABCB11 | ALK |
| ALK-INTS9 | INTS9 | ALK |
| ALK-CIB4 | CIB4 | ALK |
| ALK-WDR92 | WDR92 | ALK |
| ALK-OTX1 | ALK | OTX1 |
| ALK-PDCD10 | ALK | PDCD10 |
| ALK-PTGER4 | ALK | PTGER4 |
| ALK-PTPRJ | ALK | PTPRJ |
| ALK-ZSWIM2 | ALK | ZSWIM2 |
| ALK-FHOD3 | ALK | FHOD3 |
| ALK-FILIP1L | ALK | FILP1L |
| ALK-ITGA6 | ALK | ITGA6 |
| ALK-KCTD18 | ALK | KCTD18 |
| ALK-MAMDC4 | ALK | MAMDC4 |
| ALK-PELI1 | PELI1 | ALK |
| ALK-LINC00535 | LINC00535 | ALK |
| ALK-CTBP1 | CTBP1 | ALK |
| ALK-CARMIL1 | CARMIL1 | ALK |
| ALK-ZNF513 | ZNF513 | ALK |
| ALK-TMCO3 | TMCO3 | ALK |
| ALK-SRSF7 | SRSF7 | ALK |
| ALK-CASP8 | CASP8 | ALK |
| ALK-CYP51A1 | CYP51A1 | ALK |
| ALK-GPR113 | GPR113 | ALK |
| ALK-HADHA | HADHA | ALK |
| ALK-KIF5C | KIF5C | ALK |
| ALK-LRRFIP2 | LRRFIP2 | ALK |
| ALK-MYH10 | MYH10 | ALK |
| ALK-PDE3A | PDE3A | ALK |
| ALK-PLEC | PLEC | ALK |
| ALK-QKI | QKI | ALK |
| ALK-SASH1 | SASH1 | ALK |
| ALK-SRSF7 | SRSF7 | ALK |
| ALK-VASP | VASP | ALK |
| ALK-ZNF446 | ZNF446 | ALK |
| ALK-SOX13 | SOX13 | ALK |
| ALK-YPEL5 | YPEL5 | ALK |
| ALK-CAPN14 | ALK | CAPN14 |
| ALK-MAP3K9 | ALK | MAP3K9 |
| ALK-SNX17 | ALK | SNX17 |
| ALK-HS1BP3 | ALK | HS1BP3 |
| ALK-CREBBP | ALK | CREBBP |
| ALK-PAQR4 | ALK | PAQR4 |
| ALK-APH1A | ALK | APH1A |

[0224] In some embodiments, the ALK-ABCB11 fusion nucleic acid molecule of the disclosure comprises, in the 5′ to 3′ direction, an ABCB11 gene or a portion thereof fused to an ALK gene or a portion thereof. In some embodiments, the ALK-ACTN4 fusion nucleic acid molecule of the disclosure comprises, in the 5′ to 3′ direction, an ACTN4 gene or a portion thereof fused to an ALK gene or a portion thereof. In some embodiments, the ALK-AGAP1 fusion nucleic acid molecule of the disclosure comprises, in the 5′ to 3′ direction, an AGAP1 gene or a portion thereof fused to an ALK gene or a portion thereof. In some embodiments, the ALK-AGAP1 fusion nucleic acid molecule of the disclosure comprises, in the 5′ to 3′ direction, an ALK gene or a portion thereof fused to an AGAP1 gene or a portion thereof. In some embodiments, the ALK-APH1A fusion nucleic acid molecule of the disclosure comprises, in the 5′ to 3′ direction, an ALK gene or a portion thereof fused to an APH1A gene or a portion thereof. In some embodiments, the ALK-AZI2 fusion nucleic acid molecule of the disclosure comprises, in the 5′ to 3′ direction, an AZI2 gene or a portion thereof fused to an ALK gene or a portion thereof. In some embodiments, the ALK-BTBD9 fusion nucleic acid molecule of the disclosure comprises, in the 5′ to 3′ direction, a BTBD9 gene or a portion thereof fused to an ALK gene or a portion thereof. In some embodiments, the ALK-C2orf73 fusion nucleic acid molecule of the disclosure comprises, in the 5′ to 3′ direction, a C2orf73 gene or a portion thereof fused to an ALK gene or a portion thereof. In some embodiments, the ALK-CAPN14 fusion nucleic acid molecule of the disclosure comprises, in the 5′ to 3′ direction, an ALK gene or a portion thereof fused to a CAPN14 gene or a portion thereof. In some embodiments, the ALK-CARMIL1 fusion nucleic acid molecule of the disclosure comprises, in the 5′ to 3′ direction, a CARMIL1 gene or a portion thereof fused to an ALK gene or a portion thereof. In some embodiments, the ALK-CASP8 fusion nucleic acid molecule of the disclosure comprises, in the 5′ to 3′ direction, a CASP8 gene or a portion thereof fused to an ALK gene or a portion thereof. In some embodiments, the ALK-CDC42BPA fusion nucleic acid molecule of the disclosure comprises, in the 5′ to 3′ direction, a CDC42BPA gene or a portion thereof fused to an ALK gene or a portion thereof. In some embodiments, the ALK-CIB4 fusion nucleic acid molecule of the disclosure comprises, in the 5′ to 3′ direction, a CIB4 gene or a portion thereof fused to an ALK gene or a portion thereof. In some embodiments, the ALK-CNTNAP5 fusion nucleic acid molecule of the disclosure comprises, in the 5′ to 3′ direction, a CNTNAP5 gene or a portion thereof fused to an ALK gene or a portion thereof. In some embodiments, the ALK-COL3A1 fusion nucleic acid molecule of the disclosure comprises, in the 5′ to 3′ direction, a COL3A1 gene or a portion thereof fused to an ALK gene or a portion thereof. In some embodiments, the ALK-CPQ fusion nucleic acid molecule of the disclosure comprises, in the 5′ to 3′ direction, a CPQ gene or a portion thereof fused to an ALK gene or a portion thereof. In some embodiments, the ALK-CPSF7 fusion nucleic acid molecule of the disclosure comprises, in the 5′ to 3′ direction, a CPSF7 gene or a portion thereof fused to an ALK gene or a portion thereof. In some embodiments, the ALK-CREBBP fusion nucleic acid molecule of the disclosure comprises, in the 5′ to 3′ direction, an ALK gene or a portion thereof fused to a CREBBP gene or a portion thereof. In some embodiments, the ALK-CTBP1 fusion nucleic acid molecule of the disclosure comprises, in the 5′ to 3′ direction, a CTBP1 gene or a portion thereof fused to an ALK gene or a portion thereof. In some embodiments, the ALK-CTNND1 fusion nucleic acid molecule of the disclosure comprises, in the 5′ to 3′ direction, a CTNND1 gene or a portion thereof fused to an ALK gene or a portion thereof. In some embodiments, the ALK-CYP51A1 fusion nucleic acid molecule of the disclosure comprises, in the 5′ to 3′ direction, a CYP51A1 gene or a portion thereof fused to an ALK gene or a portion thereof. In some embodiments, the ALK-CYS1 fusion nucleic acid molecule of the disclosure comprises, in the 5′ to 3′ direction, a CYS1 gene or a portion thereof fused to an ALK gene or a portion thereof. In some embodiments, the ALK-EPHA2 fusion nucleic acid molecule of the disclosure comprises, in the 5′ to 3′ direction, an EPHA2 gene or a portion thereof fused to an ALK gene or a portion thereof. In some embodiments, the ALK-FHOD3 fusion nucleic acid molecule of the disclosure comprises, in the 5′ to 3′ direction, an ALK gene or a portion thereof fused to a FHOD3 gene or a portion thereof. In some embodiments, the ALK-GMCL1 fusion nucleic acid molecule of the disclosure comprises, in the 5′ to 3′ direction, an ALK gene or a portion thereof fused to a GMCL1 gene or a portion thereof. In some embodiments, the ALK-GPN1 fusion nucleic acid molecule of the disclosure comprises, in the 5′ to 3′ direction, a GPN1 gene or a portion thereof fused to an ALK gene or a portion thereof. In some embodiments, the ALK-GPR113 fusion nucleic acid molecule of the disclosure comprises, in the 5′ to 3′ direction, a GPR113 gene or a portion thereof fused to an ALK gene or a portion thereof. In some embodiments, the ALK-HADHA fusion nucleic acid molecule of the disclosure comprises, in the 5′ to 3′ direction, a HADHA gene or a portion thereof fused to an ALK gene or a portion thereof. In some embodiments, the ALK-HS1BP3 fusion nucleic acid molecule of the disclosure comprises, in the 5′ to 3′ direction, an ALK gene or a portion thereof fused to an HS1BP3 gene or a portion thereof. In some embodiments, the ALK-INTS9 fusion nucleic acid molecule of the disclosure comprises, in the 5′ to 3′ direction, an INTS9 gene or a portion thereof fused to an ALK gene or a portion thereof. In some embodiments, the ALK-ITGA6 fusion nucleic acid molecule of the disclosure comprises, in the 5′ to 3′ direction, an ALK gene or a portion thereof fused to an ITGA6 gene or a portion thereof. In some embodiments, the ALK-KCTD18 fusion nucleic acid molecule of the disclosure comprises, in the 5′ to 3′ direction, an ALK gene or a portion thereof fused to a KCTD18 gene or a portion thereof. In some embodiments, the ALK-KIF5C fusion nucleic acid molecule of the disclosure comprises, in the 5′ to 3′ direction, a KIF5C gene or a portion thereof fused to an ALK gene or a portion thereof. In some embodiments, the ALK-KLC4 fusion nucleic acid molecule of the disclosure comprises, in the 5′ to 3′ direction, a KLC4 gene or a portion thereof fused to an ALK gene or a portion thereof. In some embodiments, the ALK-LINC00535 fusion nucleic acid molecule of the disclosure comprises, in the 5′ to 3′ direction, a LINC00535 gene or a portion thereof fused to an ALK gene or a portion thereof. In some embodiments, the ALK-LRRFIP2 fusion nucleic acid molecule of the disclosure comprises, in the 5′ to 3′ direction, an LRRFIP2 gene or a portion thereof fused to an ALK gene or a portion thereof. In some embodiments, the ALK-MAGOHB fusion nucleic acid molecule of the disclosure comprises, in the 5′ to 3′ direction, a MAGOHB gene or a portion thereof fused to an ALK gene or a portion thereof. In some embodiments, the ALK-MAMDC4 fusion nucleic acid molecule of the disclosure comprises, in the 5′ to 3′ direction, an ALK gene or a portion thereof fused to a MAMDC4 gene or a portion thereof. In some embodiments, the ALK-MANBA fusion nucleic acid molecule of the disclosure comprises, in the 5′ to 3′ direction, a MANBA gene or a portion thereof fused to an ALK gene or a portion thereof. In some embodiments, the ALK-MAP3K9 fusion nucleic acid molecule of the disclosure comprises, in the 5′ to 3′ direction, an ALK gene or a portion thereof fused to a MAP3K9 gene or a portion thereof. In some embodiments, the ALK-MED13L fusion nucleic acid molecule of the disclosure comprises, in the 5′ to 3′ direction, an ALK gene or a portion thereof fused to an MED13L gene or a portion thereof. In some embodiments, the ALK-METTL25 fusion nucleic acid molecule of the disclosure comprises, in the 5′ to 3′ direction, a METTL25 gene or a portion thereof fused to an ALK gene or a portion thereof. In some embodiments, the ALK-MTBP fusion nucleic acid molecule of the disclosure comprises, in the 5′ to 3′ direction, an ALK gene or a portion thereof fused to an MTBP gene or a portion thereof. In some embodiments, the ALK-MYH10 fusion nucleic acid molecule of the disclosure comprises, in the 5′ to 3′ direction, an MYH10 gene or a portion thereof fused to an ALK gene or a portion thereof. In some embodiments, the ALK-MYO5C fusion nucleic acid molecule of the disclosure comprises, in the 5′ to 3′ direction, a MYO5C gene or a portion thereof fused to an ALK gene or a portion thereof. In some embodiments, the ALK-NFIA fusion nucleic acid molecule of the disclosure comprises, in the 5′ to 3′ direction, an NFIA gene or a portion thereof fused to an ALK gene or a portion thereof. In some embodiments, the ALK-NINJ2 fusion nucleic acid molecule of the disclosure comprises, in the 5′ to 3′ direction, a NINJ2 gene or a portion thereof fused to an ALK gene or a portion thereof. In some embodiments, the ALK-OPRM1 fusion nucleic acid molecule of the disclosure comprises, in the 5′ to 3′ direction, an OPRM1 gene or a portion thereof fused to an ALK gene or a portion thereof. In some embodiments, the ALK-OTX1 fusion nucleic acid molecule of the disclosure comprises, in the 5′ to 3′ direction, an ALK gene or a portion thereof fused to an OTX1 gene or a portion thereof. In some embodiments, the ALK-PAQR4 fusion nucleic acid molecule of the disclosure comprises, in the 5′ to 3′ direction, an ALK gene or a portion thereof fused to a PAQR4 gene or a portion thereof. In some embodiments, the ALK-PDCD10 fusion nucleic acid molecule of the disclosure comprises, in the 5′ to 3′ direction, an ALK gene or a portion thereof fused to a PDCD10 gene or a portion thereof. In some embodiments, the ALK-PDE3A fusion nucleic acid molecule of the disclosure comprises, in the 5′ to 3′ direction, a PDE3A gene or a portion thereof fused to an ALK gene or a portion thereof. In some embodiments, the ALK-PELI1 fusion nucleic acid molecule of the disclosure comprises, in the 5′ to 3′ direction, a PELI1 gene or a portion thereof fused to an ALK gene or a portion thereof. In some embodiments, the ALK-PLEC fusion nucleic acid molecule of the disclosure comprises, in the 5′ to 3′ direction, a PLEC gene or a portion thereof fused to an ALK gene or a portion thereof. In some embodiments, the ALK-PTGER4 fusion nucleic acid molecule of the disclosure comprises, in the 5′ to 3′ direction, an ALK gene or a portion thereof fused to a PTGER4 gene or a portion thereof. In some embodiments, the ALK-PTPRJ fusion nucleic acid molecule of the disclosure comprises, in the 5′ to 3′ direction, an ALK gene or a portion thereof fused to a PTPRJ gene or a portion thereof. In some embodiments, the ALK-QKI fusion nucleic acid molecule of the disclosure comprises, in the 5′ to 3′ direction, a QKI gene or a portion thereof fused to an ALK gene or a portion thereof. In some embodiments, the ALK-RPS6KA5 fusion nucleic acid molecule of the disclosure comprises, in the 5′ to 3′ direction, an RPS6KA5 gene or a portion thereof fused to an ALK gene or a portion thereof. In some embodiments, the ALK-SASH1 fusion nucleic acid molecule of the disclosure comprises, in the 5′ to 3′ direction, a SASH1 gene or a portion thereof fused to an ALK gene or a portion thereof. In some embodiments, the ALK-SEC16B fusion nucleic acid molecule of the disclosure comprises, in the 5′ to 3′ direction, a SEC16B gene or a portion thereof fused to an ALK gene or a portion thereof. In some embodiments, the ALK-SKAP1 fusion nucleic acid molecule of the disclosure comprises, in the 5′ to 3′ direction, a SKAP1 gene or a portion thereof fused to an ALK gene or a portion thereof. In some embodiments, the ALK-SLC25A13 fusion nucleic acid molecule of the disclosure comprises, in the 5′ to 3′ direction, an SLC25A13 gene or a portion thereof fused to an ALK gene or a portion thereof. In some embodiments, the ALK-SLC30A6 fusion nucleic acid molecule of the disclosure comprises, in the 5′ to 3′ direction, an ALK gene or a portion thereof fused to an SLC30A6 gene or a portion thereof. In some embodiments, the ALK-SNX17 fusion nucleic acid molecule of the disclosure comprises, in the 5′ to 3′ direction, an ALK gene or a portion thereof fused to an SNX17 gene or a portion thereof. In some embodiments, the ALK-SOX13 fusion nucleic acid molecule of the disclosure comprises, in the 5′ to 3′ direction, a SOX13 gene or a portion thereof fused to an ALK gene or a portion thereof. In some embodiments, the ALK-SRSF7 fusion nucleic acid molecule of the disclosure comprises, in the 5′ to 3′ direction, an SRSF7 gene or a portion thereof fused to an ALK gene or a portion thereof. In some embodiments, the ALK-TANGO6 fusion nucleic acid molecule of the disclosure comprises, in the 5′ to 3′ direction, a TANGO6 gene or a portion thereof fused to an ALK gene or a portion thereof. In some embodiments, the ALK-TG fusion nucleic acid molecule of the disclosure comprises, in the 5′ to 3′ direction, a TG gene or a portion thereof fused to an ALK gene or a portion thereof. In some embodiments, the ALK-TMCO3 fusion nucleic acid molecule of the disclosure comprises, in the 5′ to 3′ direction, a TMCO3 gene or a portion thereof fused to an ALK gene or a portion thereof. In some embodiments, the ALK-TNS3 fusion nucleic acid molecule of the disclosure comprises, in the 5′ to 3′ direction, a TNS3 gene or a portion thereof fused to an ALK gene or a portion thereof. In some embodiments, the ALK-TRIM24 fusion nucleic acid molecule of the disclosure comprises, in the 5′ to 3′ direction, a TRIM24 gene or a portion thereof fused to an ALK gene or a portion thereof. In some embodiments, the ALK-TTC28 fusion nucleic acid molecule of the disclosure comprises, in the 5′ to 3′ direction, a TTC28 gene or a portion thereof fused to an ALK gene or a portion thereof. In some embodiments, the ALK-UBE2L3 fusion nucleic acid molecule of the disclosure comprises, in the 5′ to 3′ direction, a UBE2L3 gene or a portion thereof fused to an ALK gene or a portion thereof. In some embodiments, the ALK-UBE3B fusion nucleic acid molecule of the disclosure comprises, in the 5′ to 3′ direction, a UBE3B gene or a portion thereof fused to an ALK gene or a portion thereof. In some embodiments, the ALK-UTRN fusion nucleic acid molecule of the disclosure comprises, in the 5′ to 3′ direction, a UTRN gene or a portion thereof fused to an ALK gene or a portion thereof. In some embodiments, the ALK-VASP fusion nucleic acid molecule of the disclosure comprises, in the 5′ to 3′ direction, a VASP gene or a portion thereof fused to an ALK gene or a portion thereof. In some embodiments, the ALK-WDR92 fusion nucleic acid molecule of the disclosure comprises, in the 5′ to 3′ direction, a WDR92 gene or a portion thereof fused to an ALK gene or a portion thereof. In some embodiments, the ALK-YPEL5 fusion nucleic acid molecule of the disclosure comprises, in the 5′ to 3′ direction, an YPEL5 gene or a portion thereof fused to an ALK gene or a portion thereof. In some embodiments, the ALK-ZNF446 fusion nucleic acid molecule of the disclosure comprises, in the 5′ to 3′ direction, a ZNF446 gene or a portion thereof fused to an ALK gene or a portion thereof. In some embodiments, the ALK-ZNF454 fusion nucleic acid molecule of the disclosure comprises, in the 5′ to 3′ direction, an ALK gene or a portion thereof fused to a ZNF454 gene or a portion thereof. In some embodiments, the ALK-ZNF513 fusion nucleic acid molecule of the disclosure comprises, in the 5′ to 3′ direction, a ZNF513 gene or a portion thereof fused to an ALK gene or a portion thereof. In some embodiments, the ALK-ZSWIM2 fusion nucleic acid molecule of the disclosure comprises, in the 5′ to 3′ direction, an ALK gene or a portion thereof fused to a ZSWIM2 gene or a portion thereof. In some embodiments, the ALK-FILIP1L fusion nucleic acid molecule of the disclosure comprises, in the 5′ to 3′ direction, an ALK gene or a portion thereof fused to an FILIP1L gene or a portion thereof.

[0225] In some embodiments, an ALK fusion nucleic acid molecule of the disclosure comprises or results from a 5′ breakpoint and/or a 3′ breakpoint within the corresponding exons or introns as indicated in Table 3.

TABLE 3
Exonic and intronic breakpoints of exemplary
ALK fusion nucleic acid molecules.

| ALK Fusion Nucleic | | |
|---|---|---|
| Acid Molecule | 5′ DNA Breakpoint | 3′ DNA Breakpoint |
| ALK-COL3A1 | COL3A1 intron 48 | ALK intron 18 |
| ALK-CDC42BPA | CDC42BPA intron 20 | ALK intron 19 |
| ALK-EPHA2 | EPHA2 intron 3 | ALK intron 18 |
| ALK-MY05C | MYO5C intron 30 | ALK intron 19 |
| ALK-TRIM24 | TRIM24 intron 12 | ALK intron 19 |
| ALK-SKAP1 | SKAP1 intron 3 | ALK intron 19 |
| ALK-UBE3B | UBE3B intron 11 | ALK intron 19 |
| ALK-TNS3 | TNS3 intron 25 | ALK intron 19 |
| ALK-C2orf73 | C2orf73 intron 3 | ALK intron 19 |
| ALK-AZI2 | AZI2 intron 7 | ALK intron 19 |
| ALK-MANBA | MANBA intron 14 | ALK intron 19 |
| ALK-CNTNAP5 | CNTNAP5 intron 2 | ALK intron 19 |
| ALK-TANGO6 | TANGO6 intron 1 | ALK intron 1 |
| ALK-NFIA | NFIA intron 2 | ALK intron 1 |
| ALK-RPS6KA5 | RPS6KA5 intron 1 | ALK intron 7 |
| ALK-TG | TG intron 10 | ALK intron 18 |
| ALK-LRRFIP2 | LRRFIP2 intron 25 | ALK intron 19 |
| ALK-MYO5C | MYO5C intron 30 | ALK intron 19 |
| ALK-AGAP1 | AGAP1 intron 6 | ALK intron 17 |
| ALK-MED13L | ALK intron 1 | MED13L intron 5 |
| ALK-MTBP | ALK intron 17 | MTBP intron 11 |
| ALK-SLC30A6 | ALK intron 18 | SLC30A6 intron 3 |
| ALK-GMCL1 | ALK intron 27 | GMCL1 intron 6 |
| ALK-AGAP1 | ALK intron 19 | AGAP1 intron 6 |
| ALK-ZNF454 | ALK intron 19 | ZNF454 intron 4 |
| ALK-TTC28 | TTC28 intron 1 | ALK intron 13 |
| ALK-NINJ2 | NINJ2 intron 1 | ALK intron 13 |
| ALK-UTRN | UTRN intron 72 | ALK intron 18 |
| ALK-ACTN4 | ACTN4 intron 7 | ALK intron 19 |
| ALK-CPSF7 | CPSF7 intron 5 | ALK intron 19 |
| ALK-SLC25A13 | SLC25A13 intron 10 | ALK intron 19 |
| ALK-CTNND1 | CTNND1 intron 16 | ALK intron 19 |
| ALK-KLC4 | KLC4 intron 9 | ALK intron 19 |
| ALK-BTBD9 | BTBD9 intron 5 | ALK intron 19 |
| ALK-CPQ | CPQ intron 7 | ALK intron 19 |
| ALK-KIF5C | KIF5C intron 11 | ALK intron 19 |
| ALK-MAGOHB | MAGOHB intron 1 | ALK intron 19 |
| ALK-COL3A1 | COL3A1 intron 48 | ALK intron 18 |
| ALK-OPRM1 | OPRM1 intron 3 | ALK intron 19 |
| ALK-GPN1 | GPN1 intron 1 | ALK intron 15 |
| ALK-SEC16B | SEC16B intron 13 | ALK intron 13 |
| ALK-UBE2L3 | UBE2L3 intron 1 | ALK intron 17 |
| ALK-METTL25 | METTL25 intron 8 | ALK intron 19 |
| ALK-CYS1 | CYS1 intron 1 | ALK intron 19 |
| ALK-ABCB11 | ABCB11 intron 26 | ALK intron 19 |
| ALK-INTS9 | INTS9 intron 8 | ALK intron 19 |
| ALK-CIB4 | CIB4 intron 3 | ALK intron 19 |
| ALK-WDR92 | WDR92 intron 7 | ALK intron 1 |
| ALK-OTX1 | ALK intron 19 | OTX1 intron 4 |
| ALK-PDCD10 | ALK intron 15 | PDCD10 intron 2 |
| ALK-PTGER4 | ALK intron 19 | PTGER4 intron 2 |
| ALK-PTPRJ | ALK intron 19 | PTPRJ intron 1 |
| ALK-ZSWIM2 | ALK intron 19 | ZSWIM2 intron 5 |
| ALK-FHOD3 | ALK intron 18 | FHOD3 intron 9 |
| ALK-FILIP1L | ALK intron 18 | ILIP1L intron 1 |
| ALK-ITGA6 | ALK intron 19 | ITGA6 intron 1 |
| ALK-KCTD18 | ALK intron 19 | KCTD18 intron 1 |
| ALK-MAMDC4 | ALK intron 20 | MAMDC4 intron 15 |
| ALK-PELI1 | PELI1 intron 1 | ALK intron 19 |
| ALK-LINC00535 | LINC00535 intron 5 | ALK intron 19 |
| ALK-CTBP1 | CTBP1 exon 9 | ALK intron 19 |
| ALK-CARMIL1 | CARMIL1 exon 27 | ALK intron 19 |
| ALK-ZNF513 | ZNF513 exon 1 | ALK exon 1 |
| ALK-TMCO3 | TMCO3 intron 6 | ALK exon 11 |
| ALK-SRSF7 | SRSF7 intron 4 | ALK exon 18 |
| ALK-CASP8 | CASP8 exon 10 | ALK intron 1 |
| ALK-CYP51A1 | CYP51A1 intron 9 | ALK exon 3 |
| ALK-GPR113 | GPR113 intron 1 | ALK exon 19 |
| ALK-HADHA | HADHA intron 5 | ALK exon 5 |
| ALK-LRRFIP2 | LRRFIP2 intron 22 | ALK exon 20 |
| ALK-MYH10 | MYH10 exon 38 | ALK intron 19 |
| ALK-PDE3A | PDE3A intron 10 | ALK exon 8 |
| ALK-PLEC | PLEC exon 9 | ALK intron 19 |
| ALK-QKI | QKI intron 2 | ALK exon 20 |
| ALK-SASH1 | SASH1 exon 14 | ALK intron 17 |
| ALK-SRSF7 | SRSF7 intron 5 | ALK exon 18 |
| ALK-VASP | VASP intron 4 | ALK exon 7 |
| ALK-ZNF446 | ZNF446 exon 7 | ALK intron 19 |
| ALK-SOX13 | SOX13 exon 1 | ALK exon 18 |
| ALK-YPEL5 | YPEL5 intron 1 | ALK exon 18 |
| ALK-CAPN14 | ALK exon 14 | CAPN14 intron 2 |
| ALK-MAP3K9 | ALK intron 1 | MAP3K9 exon 4 |
| ALK-SNX17 | ALK intron 13 | SNX17 exon 3 |
| ALK-HS1BP3 | ALK intron 19 | HS1BP3 exon 4 |
| ALK-CREBBP | ALK intron 3 | CREBBP exon 2 |
| ALK-PAQR4 | ALK intron 3 | PAQR4 exon 1 |
| ALK-APHIA | ALK intron 4 | APH1A exon 4 |

[0226] In some embodiments, the ALK-COL3A1 fusion nucleic acid molecule of the disclosure comprises or results from a breakpoint within intron 48 of COL3A1 and/or intron 18 of ALK. In some embodiments, the ALK-CDC42BPA fusion nucleic acid molecule of the disclosure comprises or results from a breakpoint within intron 20 of CDC42BPA and/or intron 19 of ALK. In some embodiments, the ALK-EPHA2 fusion nucleic acid molecule of the disclosure comprises or results from a breakpoint within intron 3 of EPHA2 and/or intron 18 of ALK. In some embodiments, the ALK-MYO5C fusion nucleic acid molecule of the disclosure comprises or results from a breakpoint within intron 30 of MYO5C and/or intron 19 of ALK. In some embodiments, the ALK-TRIM24 fusion nucleic acid molecule of the disclosure comprises or results from a breakpoint within intron 12 of TRIM24 and/or intron 19 of ALK. In some embodiments, the ALK-SKAP1 fusion nucleic acid molecule of the disclosure comprises or results from a breakpoint within intron 3 of SKAP1 and/or intron 19 of ALK. In some embodiments, the ALK-UBE3B fusion nucleic acid molecule of the disclosure comprises or results from a breakpoint within intron 11 of UBE3B and/or intron 19 of ALK. In some embodiments, the ALK-TNS3 fusion nucleic acid molecule of the disclosure comprises or results from a breakpoint within intron 25 of TNS3 and/or intron 19 of ALK. In some embodiments, the ALK-C2orf73 fusion nucleic acid molecule of the disclosure comprises or results from a breakpoint within intron 3 of C2orf73 and/or intron 19 of ALK. In some embodiments, the ALK-AZI2 fusion nucleic acid molecule of the disclosure comprises or results from a breakpoint within intron 7 of AZI2 and/or intron 19 of ALK. In some embodiments, the ALK-MANBA fusion nucleic acid molecule of the disclosure comprises or results from a breakpoint within intron 14 of MANBA and/or intron 19 of ALK. In some embodiments, the ALK-CNTNAP5 fusion nucleic acid molecule of the disclosure comprises or results from a breakpoint within intron 2 of CNTNAP5 and/or intron 19 of ALK. In some embodiments, the ALK-TANGO6 fusion nucleic acid molecule of the disclosure comprises or results from a breakpoint within intron 1 of TANGO6 and/or intron 1 of ALK. In some embodiments, the ALK-NFIA fusion nucleic acid molecule of the disclosure comprises or results from a breakpoint within intron 2 of NFIA and/or intron 1 of ALK. In some embodiments, the ALK-RPS6KA5 fusion nucleic acid molecule of the disclosure comprises or results from a breakpoint within intron 1 of RPS6KA5 and/or intron 7 of ALK. In some embodiments, the ALK-TG fusion nucleic acid molecule of the disclosure comprises or results from a breakpoint within intron 10 of TG and/or intron 18 of ALK. In some embodiments, the ALK-LRRFIP2 fusion nucleic acid molecule of the disclosure comprises or results from a breakpoint within intron 25 of LRRFIP2 and/or intron 19 of ALK. In some embodiments, the ALK-MYO5C fusion nucleic acid molecule of the disclosure comprises or results from a breakpoint within intron 30 of MYO5C and/or intron 19 of ALK. In some embodiments, the ALK-AGAP1 fusion nucleic acid molecule of the disclosure comprises or results from a breakpoint within intron 6 of AGAP1 and/or intron 17 of ALK. In some embodiments, the ALK-MED13L fusion nucleic acid molecule of the disclosure comprises or results from a breakpoint within intron 1 of ALK and/or intron 5 of MED13L. In some embodiments, the ALK-MTBP fusion nucleic acid molecule of the disclosure comprises or results from a breakpoint within intron 17 of ALK and/or intron 11 of MTBP. In some embodiments, the ALK-SLC30A6 fusion nucleic acid molecule of the disclosure comprises or results from a breakpoint within intron 18 of ALK and/or intron 3 of SLC30A6. In some embodiments, the ALK-GMCL1 fusion nucleic acid molecule of the disclosure comprises or results from a breakpoint within intron 27 of ALK and/or intron 6 of GMCL1. In some embodiments, the ALK-AGAP1 fusion nucleic acid molecule of the disclosure comprises or results from a breakpoint within intron 19 of ALK and/or intron 6 of AGAP1. In some embodiments, the ALK-ZNF454 fusion nucleic acid molecule of the disclosure comprises or results from a breakpoint within intron 19 of ALK and/or intron 4 of ZNF454. In some embodiments, the ALK-TTC28 fusion nucleic acid molecule of the disclosure comprises or results from a breakpoint within intron 1 of TTC28 and/or intron 13 of ALK. In some embodiments, the ALK-NINJ2 fusion nucleic acid molecule of the disclosure comprises or results from a breakpoint within intron 1 of NINJ2 and/or intron 13 of ALK. In some embodiments, the ALK-UTRN fusion nucleic acid molecule of the disclosure comprises or results from a breakpoint within intron 72 of UTRN and/or intron 18 of ALK. In some embodiments, the ALK-ACTN4 fusion nucleic acid molecule of the disclosure comprises or results from a breakpoint within intron 7 of ACTN4 and/or intron 19 of ALK. In some embodiments, the ALK-CPSF7 fusion nucleic acid molecule of the disclosure comprises or results from a breakpoint within intron 5 of CPSF7 and/or intron 19 of ALK. In some embodiments, the ALK-SLC25A13 fusion nucleic acid molecule of the disclosure comprises or results from a breakpoint within intron 10 of SLC25A13 and/or intron 19 of ALK. In some embodiments, the ALK-CTNND1 fusion nucleic acid molecule of the disclosure comprises or results from a breakpoint within intron 16 of CTNND1 and/or intron 19 of ALK. In some embodiments, the ALK-KLC4 fusion nucleic acid molecule of the disclosure comprises or results from a breakpoint within intron 9 of KLC4 and/or intron 19 of ALK. In some embodiments, the ALK-BTBD9 fusion nucleic acid molecule of the disclosure comprises or results from a breakpoint within intron 5 of BTBD9 and/or intron 19 of ALK. In some embodiments, the ALK-CPQ fusion nucleic acid molecule of the disclosure comprises or results from a breakpoint within intron 7 of CPQ and/or intron 19 of ALK. In some embodiments, the ALK-KIF5C fusion nucleic acid molecule of the disclosure comprises or results from a breakpoint within intron 11 of KIF5C and/or intron 19 of ALK. In some embodiments, the ALK-MAGOHB fusion nucleic acid molecule of the disclosure comprises or results from a breakpoint within intron 1 of MAGOHB and/or intron 19 of ALK. In some embodiments, the ALK-COL3A1 fusion nucleic acid molecule of the disclosure comprises or results from a breakpoint within intron 48 of COL3A1 and/or intron 18 of ALK. In some embodiments, the ALK-OPRM1 fusion nucleic acid molecule of the disclosure comprises or results from a breakpoint within intron 3 of OPRM1 and/or intron 19 of ALK. In some embodiments, the ALK-GPN1 fusion nucleic acid molecule of the disclosure comprises or results from a breakpoint within intron 1 of GPN1 and/or intron 15 of ALK. In some embodiments, the ALK-SEC16B fusion nucleic acid molecule of the disclosure comprises or results from a breakpoint within intron 13 of SEC16B and/or intron 13 of ALK. In some embodiments, the ALK-UBE2L3 fusion nucleic acid molecule of the disclosure comprises or results from a breakpoint within intron 1 of UBE2L3 and/or intron 17 of ALK. In some embodiments, the ALK-METTL25 fusion nucleic acid molecule of the disclosure comprises or results from a breakpoint within intron 8 of METTL25 and/or intron 19 of ALK. In some embodiments, the ALK-CYS1 fusion nucleic acid molecule of the disclosure comprises or results from a breakpoint within intron 1 of CYS1 and/or intron 19 of ALK. In some embodiments, the ALK-ABCB11 fusion nucleic acid molecule of the disclosure comprises or results from a breakpoint within intron 26 of ABCB11 and/or intron 19 of ALK. In some embodiments, the ALK-INTS9 fusion nucleic acid molecule of the disclosure comprises or results from a breakpoint within intron 8 of INTS9 and/or intron 19 of ALK. In some embodiments, the ALK-CIB4 fusion nucleic acid molecule of the disclosure comprises or results from a breakpoint within intron 3 of CIB4 and/or intron 19 of ALK. In some embodiments, the ALK-WDR92 fusion nucleic acid molecule of the disclosure comprises or results from a breakpoint within intron 7 of WDR92 and/or intron 1 of ALK. In some embodiments, the ALK-OTX1 fusion nucleic acid molecule of the disclosure comprises or results from a breakpoint within intron 19 of ALK and/or intron 4 of OTX1. In some embodiments, the ALK-PDCD10 fusion nucleic acid molecule of the disclosure comprises or results from a breakpoint within intron 15 of ALK and/or intron 2 of PDCD10. In some embodiments, the ALK-PTGER4 fusion nucleic acid molecule of the disclosure comprises or results from a breakpoint within intron 19 of ALK and/or intron 2 of PTGER4. In some embodiments, the ALK-PTPRJ fusion nucleic acid molecule of the disclosure comprises or results from a breakpoint within intron 19 of ALK and/or intron 1 of PTPRJ. In some embodiments, the ALK-ZSWIM2 fusion nucleic acid molecule of the disclosure comprises or results from a breakpoint within intron 19 of ALK and/or intron 5 of ZSWIM2. In some embodiments, the ALK-FHOD3 fusion nucleic acid molecule of the disclosure comprises or results from a breakpoint within intron 18 of ALK and/or intron 9 of FHOD3. In some embodiments, the ALK-FILIP1L fusion nucleic acid molecule of the disclosure comprises or results from a breakpoint within intron 18 of ALK and/or intron 1 of FILIP1L. In some embodiments, the ALK-ITGA6 fusion nucleic acid molecule of the disclosure comprises or results from a breakpoint within intron 19 of ALK and/or intron 1 of ITGA6. In some embodiments, the ALK-KCTD18 fusion nucleic acid molecule of the disclosure comprises or results from a breakpoint within intron 19 of ALK and/or intron 1 of KCTD18. In some embodiments, the ALK-MAMDC4 fusion nucleic acid molecule of the disclosure comprises or results from a breakpoint within intron 20 of ALK and/or intron 15 of MAMDC4. In some embodiments, the ALK-PELI1 fusion nucleic acid molecule of the disclosure comprises or results from a breakpoint within intron 1 of PELI1 and/or intron 19 of ALK. In some embodiments, the ALK-LINC00535 fusion nucleic acid molecule of the disclosure comprises or results from a breakpoint within intron 5 of LINC00535 and/or intron 19 of ALK. In some embodiments, the ALK-CTBP1 fusion nucleic acid molecule of the disclosure comprises or results from a breakpoint within exon 9 of CTBP1 and/or intron 19 of ALK. In some embodiments, the ALK-CARMIL1 fusion nucleic acid molecule of the disclosure comprises or results from a breakpoint within exon 27 of CARMIL1 and/or intron 19 of ALK. In some embodiments, the ALK-ZNF513 fusion nucleic acid molecule of the disclosure comprises or results from a breakpoint within exon 1 of ZNF513 and/or exon 1 of ALK. In some embodiments, the ALK-TMCO3 fusion nucleic acid molecule of the disclosure comprises or results from a breakpoint within intron 6 of TMCO3 and/or exon 11 of ALK. In some embodiments, the ALK-SRSF7 fusion nucleic acid molecule of the disclosure comprises or results from a breakpoint within intron 4 of SRSF7 and/or exon 18 of ALK. In some embodiments, the ALK-CASP8 fusion nucleic acid molecule of the disclosure comprises or results from a breakpoint within exon 10 of CASP8 and/or intron 1 of ALK. In some embodiments, the ALK-CYP51A1 fusion nucleic acid molecule of the disclosure comprises or results from a breakpoint within intron 9 of CYP51A1 and/or exon 3 of ALK. In some embodiments, the ALK-GPR113 fusion nucleic acid molecule of the disclosure comprises or results from a breakpoint within intron 1 of GPR113 and/or exon 19 of ALK. In some embodiments, the ALK-HADHA fusion nucleic acid molecule of the disclosure comprises or results from a breakpoint within intron 5 of HADHA and/or exon 5 of ALK. In some embodiments, the ALK-LRRFIP2 fusion nucleic acid molecule of the disclosure comprises or results from a breakpoint within intron 22 of LRRFIP2 and/or exon 20 of ALK. In some embodiments, the ALK-MYH10 fusion nucleic acid molecule of the disclosure comprises or results from a breakpoint within exon 38 of MYH10 and/or intron 19 of ALK. In some embodiments, the ALK-PDE3A fusion nucleic acid molecule of the disclosure comprises or results from a breakpoint within intron 10 of PDE3A and/or exon 8 of ALK. In some embodiments, the ALK-PLEC fusion nucleic acid molecule of the disclosure comprises or results from a breakpoint within exon 9 of PLEC and/or intron 19 of ALK. In some embodiments, the ALK-QKI fusion nucleic acid molecule of the disclosure comprises or results from a breakpoint within intron 2 of QKI and/or exon 20 of ALK. In some embodiments, the ALK-SASH1 fusion nucleic acid molecule of the disclosure comprises or results from a breakpoint within exon 14 of SASH1 and/or intron 17 of ALK. In some embodiments, the ALK-SRSF7 fusion nucleic acid molecule of the disclosure comprises or results from a breakpoint within intron 5 of SRSF7 and/or exon 18 of ALK. In some embodiments, the ALK-VASP fusion nucleic acid molecule of the disclosure comprises or results from a breakpoint within intron 4 of VASP and/or exon 7 of ALK. In some embodiments, the ALK-ZNF446 fusion nucleic acid molecule of the disclosure comprises or results from a breakpoint within exon 7 of ZNF446 and/or intron 19 of ALK. In some embodiments, the ALK-SOX13 fusion nucleic acid molecule of the disclosure comprises or results from a breakpoint within exon 1 of SOX13 and/or exon 18 ALK. In some embodiments, the ALK-YPEL5 fusion nucleic acid molecule of the disclosure comprises or results from a breakpoint within intron 1 of YPEL5 and/or exon 18 of ALK. In some embodiments, the ALK-CAPN14 fusion nucleic acid molecule of the disclosure comprises or results from a breakpoint within exon 14 of ALK and/or intron 2 of CAPN14. In some embodiments, the ALK-MAP3K9 fusion nucleic acid molecule of the disclosure comprises or results from a breakpoint within intron 1 of ALK and/or exon 4 of MAP3K9. In some embodiments, the ALK-SNX17 fusion nucleic acid molecule of the disclosure comprises or results from a breakpoint within intron 13 of ALK and/or exon 3 of SNX17. In some embodiments, the ALK-HS1BP3 fusion nucleic acid molecule of the disclosure comprises or results from a breakpoint within intron 19 of ALK and/or exon 4 of HS1BP3. In some embodiments, the ALK-CREBBP fusion nucleic acid molecule of the disclosure comprises or results from a breakpoint within intron 3 of ALK and/or exon 2 of CREBBP. In some embodiments, the ALK-PAQR4 fusion nucleic acid molecule of the disclosure comprises or results from a breakpoint within intron 3 of ALK and/or exon 1 of PAQR4. In some embodiments, the ALK-APH1A fusion nucleic acid molecule of the disclosure comprises or results from a breakpoint within intron 4 of ALK and/or exon 4 of APH1A.

[0227] In some embodiments, an ALK fusion nucleic acid molecule of the disclosure comprises or results from a 5′ breakpoint and/or a 3′ breakpoint within the corresponding chromosomal coordinates as indicated in Table 4.

TABLE 4
Chromosomal coordinates of breakpoints of exemplary
ALK fusion nucleic acid molecules.

| ALK Fusion Nucleic | | |
|---|---|---|
| Acid Molecule | 5′ DNA Breakpoint | 3′ DNA Breakpoint |
| ALK-COL3A1 | chr2: 189873851-189873891 | chr2: 29448329-29448369 |
| ALK-CDC42BPA | chr1: 227258447-227258641 | chr2: 29447175-29447325 |
| ALK-EPHA2 | chr1: 16473032-16473610 | chr2: 29449267-29449791 |
| ALK-MYO5C | chr15: 52513187-52513409 | chr2: 29447042-29447276 |
| ALK-TRIM24 | chr7: 138259438-138259669 | chr2: 29447383-29447690 |
| ALK-SKAP1 | chr17: 46426149-46426398 | chr2: 29446499-29446749 |
| ALK-UBE3B | chr12: 109937277-109937406 | chr2: 29446869-29447287 |
| ALK-TNS3 | chr7: 47333336-47333376 | chr2: 29446279-29446319 |
| ALK-C2orf73 | chr2: 54571576-54571912 | chr2: 29447055-29447357 |
| ALK-AZI2 | chr3: 28367651-28368004 | chr2: 29446143-29446537 |
| ALK-MANBA | chr4: 103560841-103561084 | chr2: 29447666-29447971 |
| ALK-CNTNAP5 | chr2: 124982770-124983057 | chr2: 29447716-29448231 |
| ALK-TANGO6 | chr16: 68877512-68877552 | chr2: 29940445-29940485 |
| ALK-NFIA | chr1: 61554202-61554242 | chr2: 29917777-29917817 |
| ALK-RPS6KA5 | chr14: 91489071-91489199 | chr2: 29541078-29541335 |
| ALK-TG | chr8: 133902377-133902916 | chr2: 29449335-29449926 |
| ALK-LRRFIP2 | chr3: 37098839-37099184 | chr2: 29447444-29447873 |
| ALK-MYO5C | chr15: 52512435-52512748 | chr2: 29447704-29448298 |
| ALK-AGAP1 | chr2: 236691113-236691343 | chr2: 29449663-29449982 |
| ALK-MED13L | chr2: 30142862-30142902 | chr12: 116457697-116457737 |
| ALK-MTBP | chr2: 29450415-29450642 | chr8: 121498376-121498554 |
| ALK-SLC30A6 | chr2: 29449705-29450046 | chr2: 32400119-32400478 |
| ALK-GMCL1 | chr2: 29420355-29420535 | chr2: 70072839-70073051 |
| ALK-AGAP1 | chr2: 29447436-29447953 | chr2: 236681905-236682235 |
| ALK-ZNF454 | chr2: 29446550-29446728 | chr5: 178380665-178380839 |
| ALK-TTC28 | chr22: 29070004-29070137 | chr2: 29456365-29456651 |
| ALK-NINJ2 | chr12: 758744-759024 | chr2: 29456325-29456573 |
| ALK-UTRN | chr6: 145163819-145164312 | chr2: 29448627-29449031 |
| ALK-ACTN4 | chr19: 39200190-39200558 | chr2: 29446977-29447411 |
| ALK-CPSF7 | chr11: 61186432-61186683 | chr2: 29447932-29448250 |
| ALK-SLC25A13 | chr7: 95814076-95814403 | chr2: 29446496-29446887 |
| ALK-CTNND1 | chr11: 57580664-57580962 | chr2: 29446968-29447253 |
| ALK-KLC4 | chr6: 43039012-43039212 | chr2: 29447007-29447235 |
| ALK-BTBD9 | chr6: 38549536-38549796 | chr2: 29447685-29447981 |
| ALK-CPQ | chr8: 98095364-98095503 | chr2: 29447780-29448006 |
| ALK-KIF5C | chr2: 149821504-149821810 | chr2: 29446775-29447077 |
| ALK-MAGOHB | chr12: 10765965-10765965 | chr2: 29446915-29446915 |
| ALK-COL3A1 | chr2: 189873873-189873913 | chr2: 29448334-29448374 |
| ALK-OPRM1 | chr6: 154466451-154466754 | chr2: 29446794-29447151 |
| ALK-GPN1 | chr2: 27851952-27852701 | chr2: 29451600-29452075 |
| ALK-SEC16B | chr1: 177916828-177917021 | chr2: 29456427-29456627 |
| ALK-UBE2L3 | chr22: 21931222-21931915 | chr2: 29450281-29450692 |
| ALK-METTL25 | chr12: 82843057-82843199 | chr2: 29446633-29446761 |
| ALK-CYS1 | chr2: 10214734-10215222 | chr2: 29447165-29447594 |
| ALK-ABCB11 | chr2: 169782189-169782398 | chr2: 29447182-29447532 |
| ALK-INTS9 | chr8: 28655333-28655587 | chr2: 29447949-29448294 |
| ALK-CIB4 | chr2: 26842893-26843172 | chr2: 29448034-29448163 |
| ALK-WDR92 | chr2: 68361884-68361924 | chr2: 29917846-29917886 |
| ALK-OTX1 | chr2: 29446763-29447082 | chr2: 63282360-63282649 |
| ALK-PDCD10 | chr2: 29455118-29455261 | chr3: 167443055-167443292 |
| ALK-PTGER4 | chr2: 29446495-29446590 | chr5: 40688492-40688617 |
| ALK-PTPRJ | chr2: 29447003-29447320 | chr11: 48037100-48037371 |
| ALK-ZSWIM2 | chr2: 29447843-29448180 | chr2: 187699208-187699458 |
| ALK-FHOD3 | chr2: 29449375-29449493 | chr18: 34195667-34195872 |
| ALK-FILIP1L | chr2: 29449660-29449973 | chr3: 99688248-99688442 |
| ALK-ITGA6 | chr2: 29447349-29447349 | chr2: 173326199-173326199 |
| ALK-KCTD18 | chr2: 29447134-29447442 | chr2: 201373509-201373886 |
| ALK-MAMDC4 | chr2: 29446201-29446434 | chr9: 139751298-139751629 |
| ALK-PELI1 | chr2: 64360629-64360629 | chr2: 29448116-29448116 |
| ALK-LINC00535 | chr8: 94669651-94669972 | chr2: 29447755-29448172 |
| ALK-CTBP1 | chr4: 1206164-1206291 | chr2: 29447285-29447572 |
| ALK-CARMIL1 | chr6: 25550917-25551280 | chr2: 29447579-29447824 |
| ALK-ZNF513 | chr2: 27603440-27603620 | chr2: 30143106-30143448 |
| ALK-TMCO3 | chr13: 114163479-114163962 | chr2: 29497970-29498226 |
| ALK-SRSF7 | chr2: 38975362-38975710 | chr2: 29449531-29449920 |
| ALK-CASP8 | chr2: 202151038-202151249 | chr2: 29969128-29969572 |
| ALK-CYP51A1 | chr7: 91745465-91745693 | chr2: 29917599-29917771 |
| ALK-GPR113 | chr2: 26546664-26546664 | chr2: 29448344-29448344 |
| ALK-HADHA | chr2: 26456000-26456242 | chr2: 29606503-29606657 |
| ALK-LRRFIP2 | chr3: 37111067-37111382 | chr2: 29446062-29446344 |
| ALK-MYH10 | chr17: 8383515-8383800 | chr2: 29446135-29446423 |
| ALK-PDE3A | chr12: 20796733-20796837 | chr2: 29541064-29541218 |
| ALK-PLEC | chr8: 145009233-145009424 | chr2: 29447974-29448217 |
| ALK-QKI | chr6: 163890860-163891168 | chr2: 29446065-29446378 |
| ALK-SASH1 | chr6: 148853694-148853955 | chr2: 29449754-29449930 |
| ALK-SRSF7 | chr2: 38974723-38975203 | chr2: 29449640-29449923 |
| ALK-VASP | chr19: 46024804-46025190 | chr2: 29543503-29543740 |
| ALK-ZNF446 | chr19: 58991381-58991664 | chr2: 29446677-29446960 |
| ALK-SOX13 | chr1: 204042405-204042653 | chr2: 29449452-29449864 |
| ALK-YPEL5 | chr2: 30378123-30378424 | chr2: 29449645-29449918 |
| ALK-CAPN14 | chr2: 29456468-29456549 | chr2: 31426279-31426378 |
| ALK-MAP3K9 | chr2: 30142828-30143036 | chr14: 71216554-71216698 |
| ALK-SNX17 | chr2: 29462409-29462706 | chr2: 27595576-27595761 |
| ALK-HS1BP3 | chr2: 29446985-29447221 | chr2: 20838147-20838335 |
| ALK-CREBBP | chr2: 29797462-29797842 | chr16: 3900331-3900680 |
| ALK-PAQR4 | chr2: 29917567-29917851 | chr16: 3019620-3019700 |
| ALK-APH1A | chr2: 29669577-29669873 | chr1: 150239704-150239811 |

[0228] In some embodiments, the ALK-COL3A1 fusion nucleic acid molecule of the disclosure comprises or results from a breakpoint within chromosomal coordinates chr2:189873851-189873891 and/or within chromosomal coordinates chr2:29448329-29448369. In some embodiments, the ALK-CDC42BPA fusion nucleic acid molecule of the disclosure comprises or results from a breakpoint within chromosomal coordinates chr1:227258447-227258641 and/or within chromosomal coordinates chr2:29447175-29447325. In some embodiments, the ALK-EPHA2 fusion nucleic acid molecule of the disclosure comprises or results from a breakpoint within chromosomal coordinates chr1:16473032-16473610 and/or within chromosomal coordinates chr2:29449267-29449791. In some embodiments, the ALK-MYO5C fusion nucleic acid molecule of the disclosure comprises or results from a breakpoint within chromosomal coordinates chr15:52513187-52513409 and/or within chromosomal coordinates chr2:29447042-29447276. In some embodiments, the ALK-TRIM24 fusion nucleic acid molecule of the disclosure comprises or results from a breakpoint within chromosomal coordinates chr7:138259438-138259669 and/or within chromosomal coordinates chr2:29447383-29447690. In some embodiments, the ALK-SKAP1 fusion nucleic acid molecule of the disclosure comprises or results from a breakpoint within chromosomal coordinates chr17:46426149-46426398 and/or within chromosomal coordinates chr2:29446499-29446749. In some embodiments, the ALK-UBE3B fusion nucleic acid molecule of the disclosure comprises or results from a breakpoint within chromosomal coordinates chr12:109937277-109937406 and/or within chromosomal coordinates chr2:29446869-29447287. In some embodiments, the ALK-TNS3 fusion nucleic acid molecule of the disclosure comprises or results from a breakpoint within chromosomal coordinates chr7:47333336-47333376 and/or within chromosomal coordinates chr2:29446279-29446319. In some embodiments, the ALK-C2orf73 fusion nucleic acid molecule of the disclosure comprises or results from a breakpoint within chromosomal coordinates chr2:54571576-54571912 and/or within chromosomal coordinates chr2:29447055-29447357. In some embodiments, the ALK-AZI2 fusion nucleic acid molecule of the disclosure comprises or results from a breakpoint within chromosomal coordinates chr3:28367651-28368004 and/or within chromosomal coordinates chr2:29446143-29446537. In some embodiments, the ALK-MANBA fusion nucleic acid molecule of the disclosure comprises or results from a breakpoint within chromosomal coordinates chr4:103560841-103561084 and/or within chromosomal coordinates chr2:29447666-29447971. In some embodiments, the ALK-CNTNAP5 fusion nucleic acid molecule of the disclosure comprises or results from a breakpoint within chromosomal coordinates chr2:124982770-124983057 and/or within chromosomal coordinates chr2:29447716-29448231. In some embodiments, the ALK-TANGO6 fusion nucleic acid molecule of the disclosure comprises or results from a breakpoint within chromosomal coordinates chr16:68877512-68877552 and/or within chromosomal coordinates chr2:29940445-29940485. In some embodiments, the ALK-NFIA fusion nucleic acid molecule of the disclosure comprises or results from a breakpoint within chromosomal coordinates chr1:61554202-61554242 and/or within chromosomal coordinates chr2:29917777-29917817. In some embodiments, the ALK-RPS6KA5 fusion nucleic acid molecule of the disclosure comprises or results from a breakpoint within chromosomal coordinates chr14:91489071-91489199 and/or within chromosomal coordinates chr2:29541078-29541335. In some embodiments, the ALK-TG fusion nucleic acid molecule of the disclosure comprises or results from a breakpoint within chromosomal coordinates chr8:133902377-133902916 and/or within chromosomal coordinates chr2:29449335-29449926. In some embodiments, the ALK-LRRFIP2 fusion nucleic acid molecule of the disclosure comprises or results from a breakpoint within chromosomal coordinates chr3:37098839-37099184 and/or within chromosomal coordinates chr2:29447444-29447873. In some embodiments, the ALK-MYO5C fusion nucleic acid molecule of the disclosure comprises or results from a breakpoint within chromosomal coordinates chr15:52512435-52512748 and/or within chromosomal coordinates chr2:29447704-29448298. In some embodiments, the ALK-AGAP1 fusion nucleic acid molecule of the disclosure comprises or results from a breakpoint within chromosomal coordinates chr2:236691113-236691343 and/or within chromosomal coordinates chr2:29449663-29449982. In some embodiments, the ALK-MED13L fusion nucleic acid molecule of the disclosure comprises or results from a breakpoint within chromosomal coordinates chr2:30142862-30142902 and/or within chromosomal coordinates chr12:116457697-116457737. In some embodiments, the ALK-MTBP fusion nucleic acid molecule of the disclosure comprises or results from a breakpoint within chromosomal coordinates chr2:29450415-29450642 and/or within chromosomal coordinates chr8:121498376-121498554. In some embodiments, the ALK-SLC30A6 fusion nucleic acid molecule of the disclosure comprises or results from a breakpoint within chromosomal coordinates chr2:29449705-29450046 and/or within chromosomal coordinates chr2:32400119-32400478. In some embodiments, the ALK-GMCL1 fusion nucleic acid molecule of the disclosure comprises or results from a breakpoint within chromosomal coordinates chr2:29420355-29420535 and/or within chromosomal coordinates chr2:70072839-70073051. In some embodiments, the ALK-AGAP1 fusion nucleic acid molecule of the disclosure comprises or results from a breakpoint within chromosomal coordinates chr2:29447436-29447953 and/or within chromosomal coordinates chr2:236681905-236682235. In some embodiments, the ALK-ZNF454 fusion nucleic acid molecule of the disclosure comprises or results from a breakpoint within chromosomal coordinates chr2:29446550-29446728 and/or within chromosomal coordinates chr5:178380665-178380839. In some embodiments, the ALK-TTC28 fusion nucleic acid molecule of the disclosure comprises or results from a breakpoint within chromosomal coordinates chr22:29070004-29070137 and/or within chromosomal coordinates chr2:29456365-29456651. In some embodiments, the ALK-NINJ2 fusion nucleic acid molecule of the disclosure comprises or results from a breakpoint within chromosomal coordinates chr12:758744-759024 and/or within chromosomal coordinates chr2:29456325-29456573. In some embodiments, the ALK-UTRN fusion nucleic acid molecule of the disclosure comprises or results from a breakpoint within chromosomal coordinates chr6:145163819-145164312 and/or within chromosomal coordinates chr2:29448627-29449031. In some embodiments, the ALK-ACTN4 fusion nucleic acid molecule of the disclosure comprises or results from a breakpoint within chromosomal coordinates chr19:39200190-39200558 and/or within chromosomal coordinates chr2:29446977-29447411. In some embodiments, the ALK-CPSF7 fusion nucleic acid molecule of the disclosure comprises or results from a breakpoint within chromosomal coordinates chr11:61186432-61186683 and/or within chromosomal coordinates chr2:29447932-29448250. In some embodiments, the ALK-SLC25A13 fusion nucleic acid molecule of the disclosure comprises or results from a breakpoint within chromosomal coordinates chr7:95814076-95814403 and/or within chromosomal coordinates chr2:29446496-29446887. In some embodiments, the ALK-CTNND1 fusion nucleic acid molecule of the disclosure comprises or results from a breakpoint within chromosomal coordinates chr11:57580664-57580962 and/or within chromosomal coordinates chr2:29446968-29447253. In some embodiments, the ALK-KLC4 fusion nucleic acid molecule of the disclosure comprises or results from a breakpoint within chromosomal coordinates chr6:43039012-43039212 and/or within chromosomal coordinates chr2:29447007-29447235. In some embodiments, the ALK-BTBD9 fusion nucleic acid molecule of the disclosure comprises or results from a breakpoint within chromosomal coordinates chr6:38549536-38549796 and/or within chromosomal coordinates chr2:29447685-29447981. In some embodiments, the ALK-CPQ fusion nucleic acid molecule of the disclosure comprises or results from a breakpoint within chromosomal coordinates chr8:98095364-98095503 and/or within chromosomal coordinates chr2:29447780-29448006. In some embodiments, the ALK-KIF5C fusion nucleic acid molecule of the disclosure comprises or results from a breakpoint within chromosomal coordinates chr2:149821504-149821810 and/or within chromosomal coordinates chr2:29446775-29447077. In some embodiments, the ALK-MAGOHB fusion nucleic acid molecule of the disclosure comprises or results from a breakpoint within chromosomal coordinates chr12:10765965-10765965 and/or within chromosomal coordinates chr2:29446915-29446915. In some embodiments, the ALK-COL3A1 fusion nucleic acid molecule of the disclosure comprises or results from a breakpoint within chromosomal coordinates chr2:189873873-189873913 and/or within chromosomal coordinates chr2:29448334-29448374. In some embodiments, the ALK-OPRM1 fusion nucleic acid molecule of the disclosure comprises or results from a breakpoint within chromosomal coordinates chr6:154466451-154466754 and/or within chromosomal coordinates chr2:29446794-29447151. In some embodiments, the ALK-GPN1 fusion nucleic acid molecule of the disclosure comprises or results from a breakpoint within chromosomal coordinates chr2:27851952-27852701 and/or within chromosomal coordinates chr2:29451600-29452075. In some embodiments, the ALK-SEC16B fusion nucleic acid molecule of the disclosure comprises or results from a breakpoint within chromosomal coordinates chr1:177916828-177917021 and/or within chromosomal coordinates chr2:29456427-29456627. In some embodiments, the ALK-UBE2L3 fusion nucleic acid molecule of the disclosure comprises or results from a breakpoint within chromosomal coordinates chr22:21931222-21931915 and/or within chromosomal coordinates chr2:29450281-29450692. In some embodiments, the ALK-METTL25 fusion nucleic acid molecule of the disclosure comprises or results from a breakpoint within chromosomal coordinates chr12:82843057-82843199 and/or within chromosomal coordinates chr2:29446633-29446761. In some embodiments, the ALK-CYS1 fusion nucleic acid molecule of the disclosure comprises or results from a breakpoint within chromosomal coordinates chr2:10214734-10215222 and/or within chromosomal coordinates chr2:29447165-29447594. In some embodiments, the ALK-ABCB11 fusion nucleic acid molecule of the disclosure comprises or results from a breakpoint within chromosomal coordinates chr2:169782189-169782398 and/or within chromosomal coordinates chr2:29447182-29447532. In some embodiments, the ALK-INTS9 fusion nucleic acid molecule of the disclosure comprises or results from a breakpoint within chromosomal coordinates chr8:28655333-28655587 and/or within chromosomal coordinates chr2:29447949-29448294. In some embodiments, the ALK-CIB4 fusion nucleic acid molecule of the disclosure comprises or results from a breakpoint within chromosomal coordinates chr2:26842893-26843172 and/or within chromosomal coordinates chr2:29448034-29448163. In some embodiments, the ALK-WDR92 fusion nucleic acid molecule of the disclosure comprises or results from a breakpoint within chromosomal coordinates chr2:68361884-68361924 and/or within chromosomal coordinates chr2:29917846-29917886. In some embodiments, the ALK-OTX1 fusion nucleic acid molecule of the disclosure comprises or results from a breakpoint within chromosomal coordinates chr2:29446763-29447082 and/or within chromosomal coordinates chr2:63282360-63282649. In some embodiments, the ALK-PDCD10 fusion nucleic acid molecule of the disclosure comprises or results from a breakpoint within chromosomal coordinates chr2:29455118-29455261 and/or within chromosomal coordinates chr3:167443055-167443292. In some embodiments, the ALK-PTGER4 fusion nucleic acid molecule of the disclosure comprises or results from a breakpoint within chromosomal coordinates chr2:29446495-29446590 and/or within chromosomal coordinates chr5:40688492-40688617. In some embodiments, the ALK-PTPRJ fusion nucleic acid molecule of the disclosure comprises or results from a breakpoint within chromosomal coordinates chr2:29447003-29447320 and/or within chromosomal coordinates chr11:48037100-48037371. In some embodiments, the ALK-ZSWIM2 fusion nucleic acid molecule of the disclosure comprises or results from a breakpoint within chromosomal coordinates chr2:29447843-29448180 and/or within chromosomal coordinates chr2:187699208-187699458. In some embodiments, the ALK-FHOD3 fusion nucleic acid molecule of the disclosure comprises or results from a breakpoint within chromosomal coordinates chr2:29449375-29449493 and/or within chromosomal coordinates chr18:34195667-34195872. In some embodiments, the ALK-FILIP1L fusion nucleic acid molecule of the disclosure comprises or results from a breakpoint within chromosomal coordinates chr2:29449660-29449973 and/or within chromosomal coordinates chr3:99688248-99688442. In some embodiments, the ALK-ITGA6 fusion nucleic acid molecule of the disclosure comprises or results from a breakpoint within chromosomal coordinates chr2:29447349-29447349 and/or within chromosomal coordinates chr2:173326199-173326199. In some embodiments, the ALK-KCTD18 fusion nucleic acid molecule of the disclosure comprises or results from a breakpoint within chromosomal coordinates chr2:29447134-29447442 and/or within chromosomal coordinates chr2:201373509-201373886. In some embodiments, the ALK-MAMDC4 fusion nucleic acid molecule of the disclosure comprises or results from a breakpoint within chromosomal coordinates chr2:29446201-29446434 and/or within chromosomal coordinates chr9:139751298-139751629. In some embodiments, the ALK-PELI1 fusion nucleic acid molecule of the disclosure comprises or results from a breakpoint within chromosomal coordinates chr2:64360629-64360629 and/or within chromosomal coordinates chr2:29448116-29448116. In some embodiments, the ALK-LINC00535 fusion nucleic acid molecule of the disclosure comprises or results from a breakpoint within chromosomal coordinates chr8:94669651-94669972 and/or within chromosomal coordinates chr2:29447755-29448172. In some embodiments, the ALK-CTBP1 fusion nucleic acid molecule of the disclosure comprises or results from a breakpoint within chromosomal coordinates chr4:1206164-1206291 and/or within chromosomal coordinates chr2:29447285-29447572. In some embodiments, the ALK-CARMIL1 fusion nucleic acid molecule of the disclosure comprises or results from a breakpoint within chromosomal coordinates chr6:25550917-25551280 and/or within chromosomal coordinates chr2:29447579-29447824. In some embodiments, the ALK-ZNF513 fusion nucleic acid molecule of the disclosure comprises or results from a breakpoint within chromosomal coordinates chr2:27603440-27603620 and/or within chromosomal coordinates chr2:30143106-30143448. In some embodiments, the ALK-TMCO3 fusion nucleic acid molecule of the disclosure comprises or results from a breakpoint within chromosomal coordinates chr13:114163479-114163962 and/or within chromosomal coordinates chr2:29497970-29498226. In some embodiments, the ALK-SRSF7 fusion nucleic acid molecule of the disclosure comprises or results from a breakpoint within chromosomal coordinates chr2:38975362-38975710 and/or within chromosomal coordinates chr2:29449531-29449920. In some embodiments, the ALK-CASP8 fusion nucleic acid molecule of the disclosure comprises or results from a breakpoint within chromosomal coordinates chr2:202151038-202151249 and/or within chromosomal coordinates chr2:29969128-29969572. In some embodiments, the ALK-CYP51A1 fusion nucleic acid molecule of the disclosure comprises or results from a breakpoint within chromosomal coordinates chr7:91745465-91745693 and/or within chromosomal coordinates chr2:29917599-29917771. In some embodiments, the ALK-GPR113 fusion nucleic acid molecule of the disclosure comprises or results from a breakpoint within chromosomal coordinates chr2:26546664-26546664 and/or within chromosomal coordinates chr2:29448344-29448344. In some embodiments, the ALK-HADHA fusion nucleic acid molecule of the disclosure comprises or results from a breakpoint within chromosomal coordinates chr2:26456000-26456242 and/or within chromosomal coordinates chr2:29606503-29606657. In some embodiments, the ALK-LRRFIP2 fusion nucleic acid molecule of the disclosure comprises or results from a breakpoint within chromosomal coordinates chr3:37111067-37111382 and/or within chromosomal coordinates chr2:29446062-29446344. In some embodiments, the ALK-MYH10 fusion nucleic acid molecule of the disclosure comprises or results from a breakpoint within chromosomal coordinates chr17:8383515-8383800 and/or within chromosomal coordinates chr2:29446135-29446423. In some embodiments, the ALK-PDE3A fusion nucleic acid molecule of the disclosure comprises or results from a breakpoint within chromosomal coordinates chr12:20796733-20796837 and/or within chromosomal coordinates chr2:29541064-29541218. In some embodiments, the ALK-PLEC fusion nucleic acid molecule of the disclosure comprises or results from a breakpoint within chromosomal coordinates chr8:145009233-145009424 and/or within chromosomal coordinates chr2:29447974-29448217. In some embodiments, the ALK-QKI fusion nucleic acid molecule of the disclosure comprises or results from a breakpoint within chromosomal coordinates chr6:163890860-163891168 and/or within chromosomal coordinates chr2:29446065-29446378. In some embodiments, the ALK-SASH1 fusion nucleic acid molecule of the disclosure comprises or results from a breakpoint within chromosomal coordinates chr6:148853694-148853955 and/or within chromosomal coordinates chr2:29449754-29449930. In some embodiments, the ALK-SRSF7 fusion nucleic acid molecule of the disclosure comprises or results from a breakpoint within chromosomal coordinates chr2:38974723-38975203 and/or within chromosomal coordinates chr2:29449640-29449923. In some embodiments, the ALK-VASP fusion nucleic acid molecule of the disclosure comprises or results from a breakpoint within chromosomal coordinates chr19:46024804-46025190 and/or within chromosomal coordinates chr2:29543503-29543740. In some embodiments, the ALK-ZNF446 fusion nucleic acid molecule of the disclosure comprises or results from a breakpoint within chromosomal coordinates chr19:58991381-58991664 and/or within chromosomal coordinates chr2:29446677-29446960. In some embodiments, the ALK-SOX13 fusion nucleic acid molecule of the disclosure comprises or results from a breakpoint within chromosomal coordinates chr1:204042405-204042653 and/or within chromosomal coordinates chr2:29449452-29449864. In some embodiments, the ALK-YPEL5 fusion nucleic acid molecule of the disclosure comprises or results from a breakpoint within chromosomal coordinates chr2:30378123-30378424 and/or within chromosomal coordinates chr2:29449645-29449918. In some embodiments, the ALK-CAPN14 fusion nucleic acid molecule of the disclosure comprises or results from a breakpoint within chromosomal coordinates chr2:29456468-29456549 and/or within chromosomal coordinates chr2:31426279-31426378. In some embodiments, the ALK-MAP3K9 fusion nucleic acid molecule of the disclosure comprises or results from a breakpoint within chromosomal coordinates chr2:30142828-30143036 and/or within chromosomal coordinates chr14:71216554-71216698. In some embodiments, the ALK-SNX17 fusion nucleic acid molecule of the disclosure comprises or results from a breakpoint within chromosomal coordinates chr2:29462409-29462706 and/or within chromosomal coordinates chr2:27595576-27595761. In some embodiments, the ALK-HS1BP3 fusion nucleic acid molecule of the disclosure comprises or results from a breakpoint within chromosomal coordinates chr2:29446985-29447221 and/or within chromosomal coordinates chr2:20838147-20838335. In some embodiments, the ALK-CREBBP fusion nucleic acid molecule of the disclosure comprises or results from a breakpoint within chromosomal coordinates chr2:29797462-29797842 and/or within chromosomal coordinates chr16:3900331-3900680. In some embodiments, the ALK-PAQR4 fusion nucleic acid molecule of the disclosure comprises or results from a breakpoint within chromosomal coordinates chr2:29917567-29917851 and/or within chromosomal coordinates chr16:3019620-3019700. In some embodiments, the ALK-APH1A fusion nucleic acid molecule of the disclosure comprises or results from a breakpoint within chromosomal coordinates chr2:29669577-29669873 and/or within chromosomal coordinates chr1:150239704-150239811.

[0229] In some embodiments of any of the ALK fusion nucleic acid molecules provided herein, the chromosomal coordinates corresponding to any of the breakpoints described herein correspond to Homo sapiens (human) genome assembly GRCh37 (hg19).

[0230] In some embodiments, an ALK fusion nucleic acid molecule of the disclosure comprises or results from a fusion between a 5′ exon, or a portion thereof, and the corresponding 3′ exon, or a portion thereof, as indicated in Table 5.

TABLE 5
Exons fused in exemplary ALK fusion nucleic acid molecules.

| ALK Fusion Nucleic Acid | | |
|---|---|---|
| Molecule | 5′ Exon | 3′ Exon |
| ALK-COL3A1 | COL3A1 exon 48 | ALK exon 19 |
| ALK-CDC42BPA | CDC42BPA exon 20 | ALK exon 20 |
| ALK-EPHA2 | EPHA2 exon 3 | ALK exon 19 |
| ALK-MYO5C | MYO5C exon 30 | ALK exon 20 |
| ALK-TRIM24 | TRIM24 exon 12 | ALK exon 20 |
| ALK-SKAP1 | SKAP1 exon 3 | ALK exon 20 |
| ALK-UBE3B | UBE3B exon 11 | ALK exon 20 |
| ALK-TNS3 | TNS3 exon 25 | ALK exon 20 |
| ALK-C2orf73 | C2orf73 exon 3 | ALK exon 20 |
| ALK-AZI2 | AZI2 exon 7 | ALK exon 20 |
| ALK-MANBA | MANBA exon 14 | ALK exon 20 |
| ALK-CNTNAP5 | CNTNAP5 exon 2 | ALK exon 20 |
| ALK-TANGO6 | TANGO6 exon 1 | ALK exon 2 |
| ALK-NFIA | NFIA exon 2 | ALK exon 2 |
| ALK-RPS6KA5 | RPS6KA5 exon 1 | ALK exon 8 |
| ALK-TG | TG exon 10 | ALK exon 19 |
| ALK-LRRFIP2 | LRRFIP2 exon 25 | ALK exon 20 |
| ALK-MYO5C | MYO5C exon 30 | ALK exon 20 |
| ALK-AGAP1 | AGAP1 exon 6 | ALK exon 18 |
| ALK-MED13L | ALK exon 1 | MED13L exon 6 |
| ALK-MTBP | ALK exon 17 | MTBP exon 12 |
| ALK-SLC30A6 | ALK exon 18 | SLC30A6 exon 4 |
| ALK-GMCL1 | ALK exon 27 | GMCL1 exon 7 |
| ALK-AGAP1 | ALK exon 19 | AGAP1 exon 7 |
| ALK-ZNF454 | ALK exon 19 | ZNF454 exon 5 |
| ALK-TTC28 | TTC28 exon 1 | ALK exon 14 |
| ALK-NINJ2 | NINJ2 exon 1 | ALK exon 14 |
| ALK-UTRN | UTRN exon 72 | ALK exon 19 |
| ALK-ACTN4 | ACTN4 exon 7 | ALK exon 20 |
| ALK-CPSF7 | CPSF7 exon 5 | ALK exon 20 |
| ALK-SLC25A13 | SLC25A13 exon 10 | ALK exon 20 |
| ALK-CTNND1 | CTNND1 exon 16 | ALK exon 20 |
| ALK-KLC4 | KLC4 exon 9 | ALK exon 20 |
| ALK-BTBD9 | BTBD9 exon 5 | ALK exon 20 |
| ALK-CPQ | CPQ exon 7 | ALK exon 20 |
| ALK-KIF5C | KIF5C exon 11 | ALK exon 20 |
| ALK-MAGOHB | MAGOHB exon 1 | ALK exon 20 |
| ALK-COL3A1 | COL3A1 exon 48 | ALK exon 19 |
| ALK-OPRM1 | OPRM1 exon 3 | ALK exon 20 |
| ALK-GPN1 | GPN1 exon 1 | ALK exon 16 |
| ALK-SEC16B | SEC16B exon 13 | ALK exon 14 |
| ALK-UBE2L3 | UBE2L3 exon 1 | ALK exon 18 |
| ALK-METTL25 | METTL25 exon 8 | ALK exon 20 |
| ALK-CYS1 | CYS1 exon 1 | ALK exon 20 |
| ALK-ABCB11 | ABCB11 exon 26 | ALK exon 20 |
| ALK-INTS9 | INTS9 exon 8 | ALK exon 20 |
| ALK-CIB4 | CIB4 exon 3 | ALK exon 20 |
| ALK-WDR92 | WDR92 exon 7 | ALK exon 2 |
| ALK-OTX1 | ALK exon 19 | OTX1 exon 5 |
| ALK-PDCD10 | ALK exon 15 | PDCD10 exon 3 |
| ALK-PTGER4 | ALK exon 19 | PTGER4 exon 3 |
| ALK-PTPRJ | ALK exon 19 | PTPRJ exon 2 |
| ALK-ZSWIM2 | ALK exon 19 | ZSWIM2 exon 6 |
| ALK-FHOD3 | ALK exon 18 | FHOD3 exon 10 |
| ALK-FILIP1L | ALK exon 18 | FILP1L exon 2 |
| ALK-ITGA6 | ALK exon 19 | ITGA6 exon 2 |
| ALK-KCTD18 | ALK exon 19 | KCTD18 exon 2 |
| ALK-MAMDC4 | ALK exon 20 | MAMDC4 exon 16 |
| ALK-PELI1 | PELI1 exon 1 | ALK exon 20 |
| ALK-LINC00535 | LINC00535 exon 5 | ALK exon 20 |
| ALK-CTBP1 | CTBP1 exon 9 | ALK exon 20 |
| ALK-CARMIL1 | CARMILI exon 27 | ALK exon 20 |
| ALK-ZNF513 | ZNF513 exon 1 | ALK exon 1 |
| ALK-TMCO3 | TMCO3 exon 6 | ALK exon 11 |
| ALK-SRSF7 | SRSF7 exon 4 | ALK exon 18 |
| ALK-CASP8 | CASP8 exon 10 | ALK exon 2 |
| ALK-CYP51A1 | CYP51A1 exon 9 | ALK exon 3 |
| ALK-GPR113 | GPR113 exon 1 | ALK exon 19 |
| ALK-HADHA | HADHA exon 5 | ALK exon 5 |
| ALK-LRRFIP2 | LRRFIP2 exon 22 | ALK exon 20 |
| ALK-MYH10 | MYH10 exon 38 | ALK exon 20 |
| ALK-PDE3A | PDE3A exon 10 | ALK exon 8 |
| ALK-PLEC | PLEC exon 9 | ALK exon 20 |
| ALK-QKI | QKI exon 2 | ALK exon 20 |
| ALK-SASH1 | SASH1 exon 14 | ALK exon 18 |
| ALK-SRSF7 | SRSF7 exon 5 | ALK exon 18 |
| ALK-VASP | VASP exon 4 | ALK exon 7 |
| ALK-ZNF446 | ZNF446 exon 7 | ALK exon 20 |
| ALK-SOX13 | SOX13 exon 1 | ALK exon 18 |
| ALK-YPEL5 | YPEL5 exon 1 | ALK exon 18 |
| ALK-CAPN14 | ALK exon 14 | CAPN14 exon 3 |
| ALK-MAP3K9 | ALK exon 1 | MAP3K9 exon 4 |
| ALK-SNX17 | ALK exon 13 | SNX17 exon 3 |
| ALK-HS1BP3 | ALK exon 19 | HS1BP3 exon 4 |
| ALK-CREBBP | ALK exon 3 | CREBBP exon 2 |
| ALK-PAQR4 | ALK exon 3 | PAQR4 exon 1 |
| ALK-APH1A | ALK exon 4 | APH1A exon 4 |

[0231] In some embodiments, the ALK-COL3A1 fusion nucleic acid molecule of the disclosure comprises or results from a fusion, in the 5′ to 3′ direction, of exon 48 of COL3A1, or a portion thereof, fused to exon 19 of ALK, or a portion thereof. In some embodiments, the ALK-CDC42BPA fusion nucleic acid molecule of the disclosure comprises or results from a fusion, in the 5′ to 3′ direction, of exon 20 of CDC42B3PA, or a portion thereof, fused to exon 20 of ALK, or a portion thereof. In some embodiments, the ALK-EPHA2 fusion nucleic acid molecule of the disclosure comprises or results from a fusion, in the 5′ to 3′ direction, of exon 3 of EPHA2, or a portion thereof, fused to exon 19 of ALK, or a portion thereof. In some embodiments, the ALK-MY05C fusion nucleic acid molecule of the disclosure comprises or results from a fusion, in the 5′ to 3′ direction, of exon 30 of MY05C, or a portion thereof, fused to exon 20 of ALK, or a portion thereof. In some embodiments, the ALK-TRIM24 fusion nucleic acid molecule of the disclosure comprises or results from a fusion, in the 5′ to 3′ direction, of exon 12 of TRIM24, or a portion thereof, fused to exon 20 of ALK, or a portion thereof. In some embodiments, the ALK-SKAP1 fusion nucleic acid molecule of the disclosure comprises or results from a fusion, in the 5′ to 3′ direction, of exon 3 of SKAP1, or a portion thereof, fused to exon 20 of ALK, or a portion thereof. In some embodiments, the ALK-UBE3B fusion nucleic acid molecule of the disclosure comprises or results from a fusion, in the 5′ to 3′ direction, of exon 11 of UBE3B, or a portion thereof, fused to exon 20 of ALK, or a portion thereof. In some embodiments, the ALK-TNS3 fusion nucleic acid molecule of the disclosure comprises or results from a fusion, in the 5′ to 3′ direction, of exon 25 of TNS3, or a portion thereof, fused to exon 20 of ALK, or a portion thereof. In some embodiments, the ALK-C2orf73 fusion nucleic acid molecule of the disclosure comprises or results from a fusion, in the 5′ to 3′ direction, of exon 3 of C2orf73, or a portion thereof, fused to exon 20 of ALK, or a portion thereof. In some embodiments, the ALK-AZI2 fusion nucleic acid molecule of the disclosure comprises or results from a fusion, in the 5′ to 3′ direction, of exon 7 of AZI2, or a portion thereof, fused to exon 20 of ALK, or a portion thereof. In some embodiments, the ALK-MANBA fusion nucleic acid molecule of the disclosure comprises or results from a fusion, in the 5′ to 3′ direction, of exon 14 of MANBA, or a portion thereof, fused to exon 20 of ALK, or a portion thereof. In some embodiments, the ALK-CNTNAP5 fusion nucleic acid molecule of the disclosure comprises or results from a fusion, in the 5′ to 3′ direction, of exon 2 of CNTNAP5, or a portion thereof, fused to exon 20 of ALK, or a portion thereof. In some embodiments, the ALK-TANGO6 fusion nucleic acid molecule of the disclosure comprises or results from a fusion, in the 5′ to 3′ direction, of exon 1 of TANGO6, or a portion thereof, fused to exon 2 of ALK, or a portion thereof. In some embodiments, the ALK-NFIA fusion nucleic acid molecule of the disclosure comprises or results from a fusion, in the 5′ to 3′ direction, of exon 2 of NFIA, or a portion thereof, fused to exon 2 of ALK, or a portion thereof. In some embodiments, the ALK-RPS6KA5 fusion nucleic acid molecule of the disclosure comprises or results from a fusion, in the 5′ to 3′ direction, of exon 1 of RPS6KA5, or a portion thereof, fused to exon 8 of ALK, or a portion thereof. In some embodiments, the ALK-TG fusion nucleic acid molecule of the disclosure comprises or results from a fusion, in the 5′ to 3′ direction, of exon 10 of TG, or a portion thereof, fused to exon 19 of ALK, or a portion thereof. In some embodiments, the ALK-LRRFIP2 fusion nucleic acid molecule of the disclosure comprises or results from a fusion, in the 5′ to 3′ direction, of exon 25 of LRRFIP2, or a portion thereof, fused to exon 20 of ALK, or a portion thereof. In some embodiments, the ALK-MYO5C fusion nucleic acid molecule of the disclosure comprises or results from a fusion, in the 5′ to 3′ direction, of exon 30 of MYOSC, or a portion thereof, fused to exon 20 of ALK, or a portion thereof. In some embodiments, the ALK-AGAP1 fusion nucleic acid molecule of the disclosure comprises or results from a fusion, in the 5′ to 3′ direction, of exon 6 of AGAP1, or a portion thereof, fused to exon 18 of ALK, or a portion thereof. In some embodiments, the ALK-MED13L fusion nucleic acid molecule of the disclosure comprises or results from a fusion, in the 5′ to 3′ direction, of exon 1 of ALK, or a portion thereof, fused to exon 6 of MED13L, or a portion thereof. In some embodiments, the ALK-MTBP fusion nucleic acid molecule of the disclosure comprises or results from a fusion, in the 5′ to 3′ direction, of exon 17 of ALK, or a portion thereof, fused to exon 12 of MTBP, or a portion thereof. In some embodiments, the ALK-SLC30A6 fusion nucleic acid molecule of the disclosure comprises or results from a fusion, in the 5′ to 3′ direction, of exon 18 of ALK, or a portion thereof, fused to exon 4 of SLC30A6, or a portion thereof. In some embodiments, the ALK-GMCL1 fusion nucleic acid molecule of the disclosure comprises or results from a fusion, in the 5′ to 3′ direction, of exon 27 of ALK, or a portion thereof, fused to exon 7 of GMCL1, or a portion thereof. In some embodiments, the ALK-AGAP1 fusion nucleic acid molecule of the disclosure comprises or results from a fusion, in the 5′ to 3′ direction, of exon 19 of ALK, or a portion thereof, fused to exon 7 of AGAP1, or a portion thereof. In some embodiments, the ALK-ZNF454 fusion nucleic acid molecule of the disclosure comprises or results from a fusion, in the 5′ to 3′ direction, of exon 19 of ALK, or a portion thereof, fused to exon 5 of ZNF454, or a portion thereof. In some embodiments, the ALK-TTC28 fusion nucleic acid molecule of the disclosure comprises or results from a fusion, in the 5′ to 3′ direction, of exon 1 of TTC28, or a portion thereof, fused to exon 14 of ALK, or a portion thereof. In some embodiments, the ALK-NINJ2 fusion nucleic acid molecule of the disclosure comprises or results from a fusion, in the 5′ to 3′ direction, of exon 1 of NINJ2, or a portion thereof, fused to exon 14 of ALK, or a portion thereof. In some embodiments, the ALK-UTRN fusion nucleic acid molecule of the disclosure comprises or results from a fusion, in the 5′ to 3′ direction, of exon 72 of UTRN, or a portion thereof, fused to exon 19 of ALK, or a portion thereof. In some embodiments, the ALK-ACTN4 fusion nucleic acid molecule of the disclosure comprises or results from a fusion, in the 5′ to 3′ direction, of exon 7 of ACTN4, or a portion thereof, fused to exon 20 of ALK, or a portion thereof. In some embodiments, the ALK-CPSF7 fusion nucleic acid molecule of the disclosure comprises or results from a fusion, in the 5′ to 3′ direction, of exon 5 of CPSF7, or a portion thereof, fused to exon 20 of ALK, or a portion thereof. In some embodiments, the ALK-SLC25A13 fusion nucleic acid molecule of the disclosure comprises or results from a fusion, in the 5′ to 3′ direction, of exon 10 of SLC25A13, or a portion thereof, fused to exon 20 of ALK, or a portion thereof. In some embodiments, the ALK-CTNND1 fusion nucleic acid molecule of the disclosure comprises or results from a fusion, in the 5′ to 3′ direction, of exon 16 of CTNND1, or a portion thereof, fused to exon 20 of ALK, or a portion thereof. In some embodiments, the ALK-KLC4 fusion nucleic acid molecule of the disclosure comprises or results from a fusion, in the 5′ to 3′ direction, of exon 9 of KLC4, or a portion thereof, fused to exon 20 of ALK, or a portion thereof. In some embodiments, the ALK-BTBD9 fusion nucleic acid molecule of the disclosure comprises or results from a fusion, in the 5′ to 3′ direction, of exon 5 of BTBD9, or a portion thereof, fused to exon 20 of ALK, or a portion thereof. In some embodiments, the ALK-CPQ fusion nucleic acid molecule of the disclosure comprises or results from a fusion, in the 5′ to 3′ direction, of exon 7 of CPQ, or a portion thereof, fused to exon 20 of ALK, or a portion thereof. In some embodiments, the ALK-KIFSC fusion nucleic acid molecule of the disclosure comprises or results from a fusion, in the 5′ to 3′ direction, of exon 11 of KIF5C, or a portion thereof, fused to exon 20 of ALK, or a portion thereof. In some embodiments, the ALK-MAGOHB fusion nucleic acid molecule of the disclosure comprises or results from a fusion, in the 5′ to 3′ direction, of exon 1 of MAGOHB, or a portion thereof, fused to exon 20 of ALK, or a portion thereof. In some embodiments, the ALK-COL3A1 fusion nucleic acid molecule of the disclosure comprises or results from a fusion, in the 5′ to 3′ direction, of exon 48 of COL3A1, or a portion thereof, fused to exon 19 of ALK, or a portion thereof. In some embodiments, the ALK-OPRM1 fusion nucleic acid molecule of the disclosure comprises or results from a fusion, in the 5′ to 3′ direction, of exon 3 of OPRM1, or a portion thereof, fused to exon 20 of ALK, or a portion thereof. In some embodiments, the ALK-GPN1 fusion nucleic acid molecule of the disclosure comprises or results from a fusion, in the 5′ to 3′ direction, of exon 1 of GPN1, or a portion thereof, fused to exon 16 of ALK, or a portion thereof. In some embodiments, the ALK-SEC16B fusion nucleic acid molecule of the disclosure comprises or results from a fusion, in the 5′ to 3′ direction, of exon 13 of SEC16B, or a portion thereof, fused to exon 14 of ALK, or a portion thereof. In some embodiments, the ALK-UBE2L3 fusion nucleic acid molecule of the disclosure comprises or results from a fusion, in the 5′ to 3′ direction, of exon 1 of UBE2L3, or a portion thereof, fused to exon 18 of ALK, or a portion thereof. In some embodiments, the ALK-METTL25 fusion nucleic acid molecule of the disclosure comprises or results from a fusion, in the 5′ to 3′ direction, of exon 8 of METTL25, or a portion thereof, fused to exon 20 of ALK, or a portion thereof. In some embodiments, the ALK-CYS1 fusion nucleic acid molecule of the disclosure comprises or results from a fusion, in the 5′ to 3′ direction, of exon 1 of CYS1, or a portion thereof, fused to exon 20 of ALK, or a portion thereof. In some embodiments, the ALK-ABCB11 fusion nucleic acid molecule of the disclosure comprises or results from a fusion, in the 5′ to 3′ direction, of exon 26 of ABCB11, or a portion thereof, fused to exon 20 of ALK, or a portion thereof. In some embodiments, the ALK-INTS9 fusion nucleic acid molecule of the disclosure comprises or results from a fusion, in the 5′ to 3′ direction, of exon 8 of INTS9, or a portion thereof, fused to exon 20 of ALK, or a portion thereof. In some embodiments, the ALK-CIB4 fusion nucleic acid molecule of the disclosure comprises or results from a fusion, in the 5′ to 3′ direction, of exon 3 of CIB4, or a portion thereof, fused to exon 20 of ALK, or a portion thereof. In some embodiments, the ALK-WDR92 fusion nucleic acid molecule of the disclosure comprises or results from a fusion, in the 5′ to 3′ direction, of exon 7 of WDR92, or a portion thereof, fused to exon 2 of ALK, or a portion thereof. In some embodiments, the ALK-OTX1 fusion nucleic acid molecule of the disclosure comprises or results from a fusion, in the 5′ to 3′ direction, of exon 19 of ALK, or a portion thereof, fused to exon 5 of OTX1, or a portion thereof. In some embodiments, the ALK-PDCD10 fusion nucleic acid molecule of the disclosure comprises or results from a fusion, in the 5′ to 3′ direction, of exon 15 of ALK, or a portion thereof, fused to exon 3 of PDCD10, or a portion thereof. In some embodiments, the ALK-PTGER4 fusion nucleic acid molecule of the disclosure comprises or results from a fusion, in the 5′ to 3′ direction, of exon 19 of ALK, or a portion thereof, fused to exon 3 of PTGER4, or a portion thereof. In some embodiments, the ALK-PTPRJ fusion nucleic acid molecule of the disclosure comprises or results from a fusion, in the 5′ to 3′ direction, of exon 19 of ALK, or a portion thereof, fused to exon 2 of PTPRJ, or a portion thereof. In some embodiments, the ALK-ZSWIM2 fusion nucleic acid molecule of the disclosure comprises or results from a fusion, in the 5′ to 3′ direction, of exon 19 of ALK, or a portion thereof, fused to exon 6 of ZSWIM2, or a portion thereof. In some embodiments, the ALK-FHOD3 fusion nucleic acid molecule of the disclosure comprises or results from a fusion, in the 5′ to 3′ direction, of exon 18 of ALK, or a portion thereof, fused to exon 10 of FHOD3, or a portion thereof. In some embodiments, the ALK-FILIP1L fusion nucleic acid molecule of the disclosure comprises or results from a fusion, in the 5′ to 3′ direction, of exon 18 of ALK, or a portion thereof, fused to exon 2 of FILP1L, or a portion thereof. In some embodiments, the ALK-ITGA6 fusion nucleic acid molecule of the disclosure comprises or results from a fusion, in the 5′ to 3′ direction, of exon 19 of ALK, or a portion thereof, fused to exon 2 of ITGA6, or a portion thereof. In some embodiments, the ALK-KCTD18 fusion nucleic acid molecule of the disclosure comprises or results from a fusion, in the 5′ to 3′ direction, of exon 19 of ALK, or a portion thereof, fused to exon 2 of KCTD18, or a portion thereof. In some embodiments, the ALK-MAMDC4 fusion nucleic acid molecule of the disclosure comprises or results from a fusion, in the 5′ to 3′ direction, of exon 20 of ALK, or a portion thereof, fused to exon 16 of MAMDC4, or a portion thereof. In some embodiments, the ALK-PELI1 fusion nucleic acid molecule of the disclosure comprises or results from a fusion, in the 5′ to 3′ direction, of exon 1 of PELI1, or a portion thereof, fused to exon 20 of ALK, or a portion thereof. In some embodiments, the ALK-PELI1 fusion nucleic acid molecule of the disclosure comprises or results from a fusion, in the 5′ to 3′ direction, of the 5′ UTR, or a portion thereof, of PELI1 (e.g., as encoded by exon 1 of PELI1 or a portion thereof), fused to exon 20 of ALK, or a portion thereof. In some embodiments, the ALK-LINC00535 fusion nucleic acid molecule of the disclosure comprises or results from a fusion, in the 5′ to 3′ direction, of exon 5 of LINC00535, or a portion thereof, fused to exon 20 of ALK, or a portion thereof. In some embodiments, the ALK-LINC00535 fusion nucleic acid molecule of the disclosure comprises or results from a fusion, in the 5′ to 3′ direction, of a UTR, or a portion thereof, of LINC00535 (e.g., as encoded by exons 1-5 of LINC00535 or a portion thereof), fused to exon 20 of ALK, or a portion thereof. In some embodiments, the ALK-CTBP1 fusion nucleic acid molecule of the disclosure comprises or results from a fusion, in the 5′ to 3′ direction, of exon 9 of CTBP1, or a portion thereof, fused to exon 20 of ALK, or a portion thereof. In some embodiments, the ALK-CARMIL1 fusion nucleic acid molecule of the disclosure comprises or results from a fusion, in the 5′ to 3′ direction, of exon 27 of CARMIL1, or a portion thereof, fused to exon 20 of ALK, or a portion thereof. In some embodiments, the ALK-ZNF513 fusion nucleic acid molecule of the disclosure comprises or results from a fusion, in the 5′ to 3′ direction, of exon 1 of ZNF513, or a portion thereof, fused to exon 1 of ALK, or a portion thereof. In some embodiments, the ALK-TMCO3 fusion nucleic acid molecule of the disclosure comprises or results from a fusion, in the 5′ to 3′ direction, of exon 6 of TMCO3, or a portion thereof, fused to exon 11 of ALK, or a portion thereof. In some embodiments, the ALK-SRSF7 fusion nucleic acid molecule of the disclosure comprises or results from a fusion, in the 5′ to 3′ direction, of exon 4 of SRSF7, or a portion thereof, fused to exon 18 of ALK, or a portion thereof. In some embodiments, the ALK-CASP8 fusion nucleic acid molecule of the disclosure comprises or results from a fusion, in the 5′ to 3′ direction, of exon 10 of CASP8, or a portion thereof, fused to exon 2 of ALK, or a portion thereof. In some embodiments, the ALK-CYP51A1 fusion nucleic acid molecule of the disclosure comprises or results from a fusion, in the 5′ to 3′ direction, of exon 9 of CYP51A1, or a portion thereof, fused to exon 3 of ALK, or a portion thereof. In some embodiments, the ALK-GPR113 fusion nucleic acid molecule of the disclosure comprises or results from a fusion, in the 5′ to 3′ direction, of exon 1 of GPR113, or a portion thereof, fused to exon 19 of ALK, or a portion thereof. In some embodiments, the ALK-HADHA fusion nucleic acid molecule of the disclosure comprises or results from a fusion, in the 5′ to 3′ direction, of exon 5 of HADHA, or a portion thereof, fused to exon 5 of ALK, or a portion thereof. In some embodiments, the ALK-LRRFIP2 fusion nucleic acid molecule of the disclosure comprises or results from a fusion, in the 5′ to 3′ direction, of exon 22 of LRRFIP2, or a portion thereof, fused to exon 20 of ALK, or a portion thereof. In some embodiments, the ALK-MYH10 fusion nucleic acid molecule of the disclosure comprises or results from a fusion, in the 5′ to 3′ direction, of exon 38 of MYH10, or a portion thereof, fused to exon 20 of ALK, or a portion thereof. In some embodiments, the ALK-PDE3A fusion nucleic acid molecule of the disclosure comprises or results from a fusion, in the 5′ to 3′ direction, of exon 10 of PDE3A, or a portion thereof, fused to exon 8 of ALK, or a portion thereof. In some embodiments, the ALK-PLEC fusion nucleic acid molecule of the disclosure comprises or results from a fusion, in the 5′ to 3′ direction, of exon 9 of PLEC, or a portion thereof, fused to exon 20 of ALK, or a portion thereof. In some embodiments, the ALK-QKI fusion nucleic acid molecule of the disclosure comprises or results from a fusion, in the 5′ to 3′ direction, of exon 2 of QKI, or a portion thereof, fused to exon 20 of ALK, or a portion thereof. In some embodiments, the ALK-SASH1 fusion nucleic acid molecule of the disclosure comprises or results from a fusion, in the 5′ to 3′ direction, of exon 14 of SASH1, or a portion thereof, fused to exon 18 of ALK, or a portion thereof. In some embodiments, the ALK-SRSF7 fusion nucleic acid molecule of the disclosure comprises or results from a fusion, in the 5′ to 3′ direction, of exon 5 of SRSF7, or a portion thereof, fused to exon 18 of ALK, or a portion thereof. In some embodiments, the ALK-VASP fusion nucleic acid molecule of the disclosure comprises or results from a fusion, in the 5′ to 3′ direction, of exon 4 of VASP, or a portion thereof, fused to exon 7 of ALK, or a portion thereof. In some embodiments, the ALK-ZNF446 fusion nucleic acid molecule of the disclosure comprises or results from a fusion, in the 5′ to 3′ direction, of exon 7 of ZNF446, or a portion thereof, fused to exon 20 of ALK, or a portion thereof. In some embodiments, the ALK-SOX13 fusion nucleic acid molecule of the disclosure comprises or results from a fusion, in the 5′ to 3′ direction, of exon 1 of SOX13, or a portion thereof, fused to exon 18 of ALK, or a portion thereof. In some embodiments, the ALK-SOX13 fusion nucleic acid molecule of the disclosure comprises or results from a fusion, in the 5′ to 3′ direction, of the 5′ UTR, or a portion thereof, of SOX13 (e.g., as encoded by exon 1 of SOX13 or a portion thereof), fused to exon 18 of ALK, or a portion thereof. In some embodiments, the ALK-YPEL5 fusion nucleic acid molecule of the disclosure comprises or results from a fusion, in the 5′ to 3′ direction, of exon 1 of YPEL5, or a portion thereof, fused to exon 18 of ALK, or a portion thereof. In some embodiments, the ALK-YPEL5 fusion nucleic acid molecule of the disclosure comprises or results from a fusion, in the 5′ to 3′ direction, of the 5′ UTR, or a portion thereof, of YPEL5 (e.g., as encoded by exon 1 of YPEL5 or a portion thereof), fused to exon 18 of ALK, or a portion thereof. In some embodiments, the ALK-CAPN14 fusion nucleic acid molecule of the disclosure comprises or results from a fusion, in the 5′ to 3′ direction, of exon 14 of ALK, or a portion thereof, fused to exon 3 of CAPN14, or a portion thereof. In some embodiments, the ALK-MAP3K9 fusion nucleic acid molecule of the disclosure comprises or results from a fusion, in the 5′ to 3′ direction, of exon 1 of ALK, or a portion thereof, fused to exon 4 of MAP3K9, or a portion thereof. In some embodiments, the ALK-SNX17 fusion nucleic acid molecule of the disclosure comprises or results from a fusion, in the 5′ to 3′ direction, of exon 13 of ALK, or a portion thereof, fused to exon 3 of SNX17, or a portion thereof. In some embodiments, the ALK-HS1BP3 fusion nucleic acid molecule of the disclosure comprises or results from a fusion, in the 5′ to 3′ direction, of exon 19 of ALK, or a portion thereof, fused to exon 4 of HS1BP3, or a portion thereof. In some embodiments, the ALK-CREBBP fusion nucleic acid molecule of the disclosure comprises or results from a fusion, in the 5′ to 3′ direction, of exon 3 of ALK, or a portion thereof, fused to exon 2 of CREBBP, or a portion thereof. In some embodiments, the ALK-PAQR4 fusion nucleic acid molecule of the disclosure comprises or results from a fusion, in the 5′ to 3′ direction, of exon 3 of ALK, or a portion thereof, fused to exon 1 of PAQR4, or a portion thereof.

[0232] In some embodiments, the ALK-APH1A fusion nucleic acid molecule of the disclosure comprises or results from a fusion, in the 5′ to 3′ direction, of exon 4 of ALK, or a portion thereof, fused to exon 4 of APH1A, or a portion thereof.

[0233] In some embodiments, an ALK fusion nucleic acid molecule of the disclosure comprises, in the 5′ to 3′ direction, the corresponding exons or portions thereof as listed in Table 6.

TABLE 6
Exons in exemplary ALK fusion nucleic acid molecules.

| ALK Fusion Nucleic | Exons fused, in the 5′ |
|---|---|
| Acid Molecule | to 3′ direction |
| ALK-COL3A1 | Exons 1-47, and exon 48 or a portion |
| | thereof, of COL3A1 fused to exon 19 |
| | or a portion thereof, and exons 20-29, |
| | of ALK. |
| ALK-CDC42BPA | Exons 1-19, and exon 20 or a portion |
| | thereof, of CDC42BPA fused to |
| | exon 20 or a portion thereof, and |
| | exons 21-29, of ALK. |
| ALK-EPHA2 | Exons 1-2, and exon 3 or a portion |
| | thereof, of EPHA2 fused to exon 19 |
| | or a portion thereof, and exons 20-29, |
| | of ALK. |
| ALK-MYO5C | Exons 1-29, and exon 30 or a |
| | portion thereof, of MYO5C fused to |
| | exon 20 or a portion thereof, and |
| | exons 21-29, of ALK. |
| ALK-TRIM24 | Exons 1-11, and exon 12 or a portion |
| | thereof, of TRIM24 fused to exon 20 |
| | or a portion thereof, and exons 21-29, |
| | of ALK. |
| ALK-SKAP1 | Exons 1-2, and exon 3 or a portion |
| | thereof, of SKAP1 fused to exon 20 |
| | or a portion thereof, and exons 21-29, |
| | of ALK. |
| ALK-UBE3B | Exons 1-10, and exon 11 or a portion |
| | thereof, of UBE3B fused to exon 20 |
| | or a portion thereof, and exons 21-29, |
| | of ALK. |
| ALK-TNS3 | Exons 1-24, and exon 25 or a portion |
| | thereof, of TNS3 fused to exon 20 |
| | or a portion thereof, and exons 21-29, |
| | of ALK. |
| ALK-C2orf73 | Exons 1-2, and exon 3 or a portion |
| | thereof, of C2orf73 fused to exon 20 |
| | or a portion thereof, and exons 21-29, |
| | of ALK. |
| ALK-AZI2 | Exons 1-6, and exon 7 or a portion |
| | thereof, of AZI2 fused to exon 20 |
| | or a portion thereof, and exons 21-29, |
| | of ALK. |
| ALK-MANBA | Exons 1-13, and exon 14 or a |
| | portion thereof, of MANBA fused |
| | to exon 20 or a portion thereof, and |
| | exons 21-29, of ALK. |
| ALK-CNTNAP5 | Exon 1, and exon 2 or a portion |
| | thereof, of CNTNAP5 fused to exon |
| | 20 or a portion thereof, and exons |
| | 21-29, of ALK. |
| ALK-TANGO6 | Exon 1 or a portion thereof of |
| | TANGO6 fused to exon 2 or a |
| | portion thereof, and exons 3-29, of |
| | ALK. |
| ALK-NFIA | Exon 1, and exon 2 or a portion |
| | thereof, of NFIA fused to exon 2 |
| | or a portion thereof, and exons 3-29, |
| | of ALK. |
| ALK-RPS6KA5 | Exon 1 or a portion thereof of |
| | RPS6KA5 fused to exon 8 or a |
| | portion thereof, and exons 9-29, |
| | of ALK. |
| ALK-TG | Exons 1-9, and exon 10 or a |
| | portion thereof, of TG fused to exon |
| | 19 or a portion thereof, and exons |
| | 20-29, of ALK. |
| ALK-LRRFIP2 | Exons 1-24, and exon 25 or a portion |
| | thereof, of LRRFIP2 fused to exon |
| | 20 or a portion thereof, and exons |
| | 21-29, of ALK. |
| ALK-MYO5C | Exons 1-29, and exon 30 or a |
| | portion thereof, of MYO5C fused to |
| | exon 20 or a portion thereof, and |
| | exons 21-29, of ALK. |
| ALK-AGAP1 | Exons 1-5, and exon 6 or a portion |
| | thereof, of AGAP1 fused to exon 18 |
| | or a portion thereof, and exons 19-29, |
| | of ALK. |
| ALK-MED13L | Exon 1 or a portion thereof of ALK |
| | fused to exon 6 or a portion thereof, |
| | and exons 7-31, of MED13L. |
| ALK-MTBP | Exons 1-16, and exon 17 or a portion |
| | thereof, of ALK fused to exon 12 or |
| | a portion thereof, and exons 13-22, |
| | of MTBP. |
| ALK-SLC30A6 | Exons 1-17, and exon 18 or a |
| | portion thereof, of ALK fused to |
| | exon 4 or a portion thereof, and |
| | exons 5-14, of SLC30A6. |
| ALK-GMCL1 | Exons 1-26, and exon 27 or a portion |
| | thereof, of ALK fused to exon 7 or a |
| | portion thereof, and exons 8-14, of |
| | GMCL1. |
| ALK-AGAP1 | Exons 1-18, and exon 19 or a |
| | portion thereof, of ALK fused to |
| | exon 7 or a portion thereof, and |
| | exons 8-17, of AGAP1. |
| ALK-ZNF454 | Exons 1-18, and exon 19 or a portion |
| | thereof, of ALK fused to exon 5 or |
| | a portion thereof of ZNF454. |
| ALK-TTC28 | Exon 1 or a portion thereof of |
| | TTC28 fused to exon 14 or a portion |
| | thereof, and exons 15-29, of ALK. |
| ALK-NINJ2 | Exon 1 or a portion thereof of NINJ2 |
| | fused to exon 14 or a portion thereof, |
| | and exons 15-29, of ALK. |
| ALK-UTRN | Exons 1-71, and exon 72 or a portion |
| | thereof, of UTRN fused to exon 19 |
| | or a portion thereof, and exons 20-29, |
| | of ALK. |
| ALK-ACTN4 | Exons 1-6, and exon 7 or a portion |
| | thereof, of ACTN4 fused to exon 20 |
| | or a portion thereof, and exons 21-29, |
| | of ALK. |
| ALK-CPSF7 | Exons 1-4, and exon 5 or a portion |
| | thereof, of CPSF7 fused to exon 20 |
| | or a portion thereof, and exons 21-29, |
| | of ALK. |
| ALK-SLC25A13 | Exons 1-9, and exon 10 or a portion |
| | thereof, of SLC25A13 fused to exon |
| | 20 or a portion thereof, and exons |
| | 21-29, of ALK. |
| ALK-CTNND1 | Exons 1-15, and exon 16 or a portion |
| | thereof, of CTNND1 fused to exon |
| | 20 or a portion thereof, and exons |
| | 21-29, of ALK. |
| ALK-KLC4 | Exons 1-8, and exon 9 or a portion |
| | thereof, of KLC4 fused to exon 20 |
| | or a portion thereof, and exons |
| | 21-29, of ALK. |
| ALK-BTBD9 | Exons 1-4, and exon 5 or a portion |
| | thereof, of BTBD9 fused to exon 20 |
| | or a portion thereof, and exons 21-29, |
| | of ALK. |
| ALK-CPQ | Exons 1-6, and exon 7 or a portion |
| | thereof, of CPQ fused to exon 20 or |
| | a portion thereof, and exons 21-29, |
| | of ALK. |
| ALK-KIF5C | Exons 1-10, and exon 11 or a portion |
| | thereof, of KIF5C fused to exon 20 |
| | or a portion thereof, and 21-29, of |
| | ALK. |
| ALK-MAGOHB | Exon 1 or a portion thereof of |
| | MAGOHB fused to exon 20 or a |
| | portion thereof, and exons 21-29, |
| | of ALK. |
| ALK-COL3A1 | Exons 1-47, and exon 48 or a |
| | portion thereof, of COL3A1 fused |
| | to exon 19 or a portion thereof, and |
| | exons 20-29, of ALK. |
| ALK-OPRM1 | Exons 1-2, and exon 3 or a portion |
| | thereof, of OPRM1 fused to exon 20 |
| | or a portion thereof, and exons |
| | 21-29, of ALK. |
| ALK-GPN1 | Exon 1 or a portion thereof of GPN1 |
| | fused to exon 16 or a portion thereof, |
| | and exons 17-29, of ALK. |
| ALK-SEC16B | Exons 1-12, and exon 13 or a |
| | portion thereof, of SEC16B fused to |
| | exon 14 or a portion thereof, and |
| | exons 15-29, of ALK. |
| ALK-UBE2L3 | Exon 1 or a portion thereof of |
| | UBE2L3 fused to exon 18 or a |
| | portion thereof, and exons 19-29, |
| | of ALK. |
| ALK-METTL25 | Exons 1-7, and exon 8 or a portion |
| | thereof, of METTL25 fused to |
| | exon 20 or a portion thereof, and |
| | exons 21-29, of ALK. |
| ALK-CYS1 | Exon 1 or a portion thereof of |
| | CYS1 fused to exon 20 or a |
| | portion thereof, and exons 21-29, |
| | of ALK. |
| ALK-ABCB11 | Exons 1-25, and exon 26 or a |
| | portion thereof, of ABCB11 fused |
| | to exon 20 or a portion thereof, and |
| | exons 21-29, of ALK. |
| ALK-INTS9 | Exons 1-7, and exon 8 or a portion |
| | thereof, of INTS9 fused to exon 20 |
| | or a portion thereof, and exons |
| | 21-29, of ALK. |
| ALK-CIB4 | Exons 1-2, and exon 3 or a portion |
| | thereof, of CIB4 fused to exon 20 |
| | or a portion thereof, and exons 21-29, |
| | of ALK. |
| ALK-WDR92 | Exons 1-6, and exon 7 or a portion |
| | thereof, of WDR92 fused to exon 2 |
| | or a portion thereof, and exons 3-29 |
| | of ALK. |
| ALK-OTX1 | Exons 1-18, and exon 19 or a portion |
| | thereof, of ALK fused to exon 5 or a |
| | portion thereof of OTX1. |
| ALK-PDCD10 | Exons 1-14, and exon 15 or a |
| | portion thereof, of ALK fused to |
| | exon 3 or a portion thereof, and |
| | exons 4-9, of PDCD10. |
| ALK-PTGER4 | Exons 1-18, and exon 19 or a |
| | portion thereof, of ALK fused to |
| | exon 3 or a portion thereof of |
| | PTGER4. |
| ALK-PTPRJ | Exons 1-18, and exon 19 or a |
| | portion thereof, of ALK fused to |
| | exon 2 or a portion thereof, and |
| | exons 3-25, of PTPRJ. |
| ALK-ZSWIM2 | Exons 1-18, and exon 19 or a |
| | portion thereof, of ALK fused to |
| | exon 6 or a portion thereof, and |
| | exons 7-9, of ZSWIM2. |
| ALK-FHOD3 | Exons 1-17, and exon 18 or a |
| | portion thereof, of ALK fused to |
| | exon 10 or a portion thereof, and |
| | exons 11-25, of FOHD3. |
| ALK-FILIP1L | Exons 1-17, and exon 18 or a portion |
| | thereof, of ALK fused to exon 2 or a |
| | portion thereof, and exons 3-6, |
| | of FILP1L. |
| ALK-ITGA6 | Exons 1-18, and exon 19 or a |
| | portion thereof, of ALK fused to |
| | exon 2 or a portion thereof, and |
| | exons 3-26, of ITGA6. |
| ALK-KCTD18 | Exons 1-18, and exon 19 or a |
| | portion thereof, of ALK fused to |
| | exon 2 or a portion thereof, and |
| | exons 3-7, of KCTD18. |
| ALK-MAMDC4 | Exons 1-19, and exon 20 or a |
| | portion thereof, of ALK fused to |
| | exon 16 or a portion thereof, and |
| | exons 17-27, of MAMDC4. |
| ALK-PELI1 | Exon 1 or a portion thereof, of PELI1 |
| | fused to exon 20 or a portion thereof, |
| | and exons 21-29, of ALK. |
| ALK-LINC00535 | Exons 1-4, and exon 5 or a portion |
| | thereof, of LINC00535 fused to exon |
| | 20 or a portion thereof, and exons |
| | 21-29, of ALK. |
| ALK-CTBP1 | Exons 1-8, and exon 9 or a portion |
| | thereof, of CTBP1 fused to exon 20 |
| | or a portion thereof, and exons 21-29 |
| | of ALK. |
| ALK-CARMIL1 | Exons 1-26, and exon 27 or a portion |
| | thereof, of CARMIL1 fused to exon |
| | 20 or a portion thereof, and exons |
| | 21-29 of ALK. |
| ALK-ZNF513 | Exon 1 or a portion thereof of |
| | ZNF513 fused to exon 1 or a portion |
| | thereof, and exons 2-29, of ALK. |
| ALK-TMCO3 | Exons 1-5, and exon 6 or a portion |
| | thereof, of TMCO3 fused to exon 11 |
| | or a portion thereof, and exons 12-29, |
| | of ALK. |
| ALK-SRSF7 | Exons 1-3, and exon 4 or a portion |
| | thereof, of SRSF7 fused to exon 18 |
| | or a portion thereof, and exons |
| | 19-29, of ALK. |
| ALK-CASP8 | Exons 1-9, and exon 10 or a portion |
| | thereof, of CASP8 fused to exon 2 |
| | or a portion thereof, and exons 3-29, |
| | of ALK. |
| ALK-CYP51A1 | Exons 1-8, and exon 9 or a portion |
| | thereof, of CYP51A1 fused to exon |
| | 3 or a portion thereof, and exons |
| | 4-29, of ALK. |
| ALK-GPR113 | Exon 1 or a portion thereof of |
| | GPR113 fused to exon 19 or a |
| | portion thereof, and exons 20-29 |
| | of ALK |
| ALK-HADHA | Exons 1-4, and exon 5 or a portion |
| | thereof, of HADHA fused to exon 5 |
| | or a portion thereof, and exons |
| | 6-29, of ALK. |
| ALK-LRRFIP2 | Exons 1-21, and exon 22 or a |
| | portion thereof, of LRRFIP2 fused |
| | to exon 20 or a portion thereof, |
| | and exons 21-29 of ALK. |
| ALK-MYH10 | Exons 1-37, and exon 38 or a |
| | portion thereof, of MYH10 fused |
| | to exon 20 or a portion thereof, |
| | and exons 21-29 of ALK. |
| ALK-PDE3A | Exons 1-9, and exon 10 or a |
| | portion thereof, of PDE3A fused |
| | to exon 8 or a portion thereof, |
| | and exons 9-29, of ALK. |
| ALK-PLEC | Exons 1-8, and exon 9 or a portion |
| | thereof, of PLEC fused to exon 20 |
| | or a portion thereof, and exons 21-29 |
| | of ALK. |
| ALK-QKI | Exon 1, and exon 2 or a portion |
| | thereof, of QKI fused to exon 20 or |
| | a portion thereof, and exons 21-29 |
| | of ALK. |
| ALK-SASH1 | Exons 1-13, and exon 14 or a portion |
| | thereof, of SASH1 fused to exon 18 |
| | or a portion thereof, and exons 19-29, |
| | of ALK. |
| ALK-SRSF7 | Exons 1-4, and exon 5 or a portion |
| | thereof, of SRSF7 fused to exon 18 |
| | or a portion thereof, and exons |
| | 19-29, of ALK. |
| ALK-VASP | Exons 1-3, and exon 4 or a portion |
| | thereof, of VASP fused to exon 7 |
| | or a portion thereof, and exons |
| | 8-29, of ALK. |
| ALK-ZNF446 | Exons 1-6, and exon 7 or a portion |
| | thereof, of ZNF446 fused to exon |
| | 20 or a portion thereof, and exons |
| | 21-29 of ALK. |
| ALK-SOX13 | Exon 1 or a portion thereof of |
| | SOX13 fused to exon 18 or a |
| | portion thereof, and exons 19-29, |
| | of ALK. |
| ALK-YPEL5 | Exon 1 or a portion thereof of |
| | YPEL5 fused to exon 18 or a |
| | portion thereof, and exons 19-29, |
| | of ALK. |
| ALK-CAPN14 | Exons 1-13, and exon 14 or a |
| | portion thereof, of ALK fused to |
| | exon 3 or a portion thereof, and |
| | exons 4-22, of CAPN14. |
| ALK-MAP3K9 | Exon 1 or a portion thereof of ALK |
| | fused to exon 4 or a portion thereof, |
| | and exons 5-13, of MAP3K9. |
| ALK-SNX17 | Exons 1-12, and exon 13 or a portion |
| | thereof, of ALK fused to exon 3 or |
| | a portion thereof, and exons 4-15, |
| | of SNX17. |
| ALK-HS1BP3 | Exon 1-18, and exon 19 or a portion |
| | thereof, of ALK fused to exon 4 or |
| | a portion thereof, and exons 5-7, |
| | of HS1BP3. |
| ALK-CREBBP | Exons 1-2, and exon 3 or a portion |
| | thereof, of ALK fused to exon 2 |
| | or a portion thereof, and exons 3-31, |
| | of CREBBP. |
| ALK-PAQR4 | Exons 1-2, and exon 3 or a portion |
| | thereof, of ALK fused to exon 1 or |
| | a portion thereof, and exons 2-3, |
| | of PAQR4. |
| ALK-APH1A | Exons 1-3, and exon 4 or a |
| | portion thereof, of ALK fused to |
| | exon 4 or a portion thereof, and |
| | exons 5-6, of APH1A. |

[0234] In some embodiments, the ALK-COL3A1 fusion nucleic acid molecule of the disclosure comprises, in the 5′ to 3′ direction, exons 1-47, and exon 48 or a portion thereof, of COL3A1 fused to exon 19 or a portion thereof, and exons 20-29, of ALK. In some embodiments, the ALK-CDC42BPA fusion nucleic acid molecule of the disclosure comprises, in the 5′ to 3′ direction, exons 1-19, and exon 20 or a portion thereof, of CDC42BPA fused to exon 20 or a portion thereof, and exons 21-29, of ALK. In some embodiments, the ALK-EPHA2 fusion nucleic acid molecule of the disclosure comprises, in the 5′ to 3′ direction, exons 1-2, and exon 3 or a portion thereof, of EPHA2 fused to exon 19 or a portion thereof, and exons 20-29, of ALK. In some embodiments, the ALK-MYO5C fusion nucleic acid molecule of the disclosure comprises, in the 5′ to 3′ direction, exons 1-29, and exon 30 or a portion thereof, of MYO5C fused to exon 20 or a portion thereof, and exons 21-29, of ALK. In some embodiments, the ALK-TRIM24 fusion nucleic acid molecule of the disclosure comprises, in the 5′ to 3′ direction, exons 1-11, and exon 12 or a portion thereof, of TRIM24 fused to exon 20 or a portion thereof, and exons 21-29, of ALK. In some embodiments, the ALK-SKAP1 fusion nucleic acid molecule of the disclosure comprises, in the 5′ to 3′ direction, exons 1-2, and exon 3 or a portion thereof, of SKAP1 fused to exon 20 or a portion thereof, and exons 21-29, of ALK. In some embodiments, the ALK-UBE3B fusion nucleic acid molecule of the disclosure comprises, in the 5′ to 3′ direction, exons 1-10, and exon 11 or a portion thereof, of UBE3B fused to exon 20 or a portion thereof, and exons 21-29, of ALK. In some embodiments, the ALK-TNS3 fusion nucleic acid molecule of the disclosure comprises, in the 5′ to 3′ direction, exons 1-24, and exon 25 or a portion thereof, of TNS3 fused to exon 20 or a portion thereof, and exons 21-29, of ALK. In some embodiments, the ALK-C2orf73 fusion nucleic acid molecule of the disclosure comprises, in the 5′ to 3′ direction, exons 1-2, and exon 3 or a portion thereof, of C2orf73 fused to exon 20 or a portion thereof, and exons 21-29, of ALK. In some embodiments, the ALK-AZI2 fusion nucleic acid molecule of the disclosure comprises, in the 5′ to 3′ direction, exons 1-6, and exon 7 or a portion thereof, of AZI2 fused to exon 20 or a portion thereof, and exons 21-29, of ALK. In some embodiments, the ALK-MANBA fusion nucleic acid molecule of the disclosure comprises, in the 5′ to 3′ direction, exons 1-13, and exon 14 or a portion thereof, of MANBA fused to exon 20 or a portion thereof, and exons 21-29, of ALK. In some embodiments, the ALK-CNTNAP5 fusion nucleic acid molecule of the disclosure comprises, in the 5′ to 3′ direction, exon 1, and exon 2 or a portion thereof, of CNTNAP5 fused to exon 20 or a portion thereof, and exons 21-29, of ALK. In some embodiments, the ALK-TANGO6 fusion nucleic acid molecule of the disclosure comprises, in the 5′ to 3′ direction, exon 1 or a portion thereof of TANGO6 fused to exon 2 or a portion thereof, and exons 3-29, of ALK. In some embodiments, the ALK-NFIA fusion nucleic acid molecule of the disclosure comprises, in the 5′ to 3′ direction, exon 1, and exon 2 or a portion thereof, of NFIA fused to exon 2 or a portion thereof, and exons 3-29, of ALK. In some embodiments, the ALK-RPS6KA5 fusion nucleic acid molecule of the disclosure comprises, in the 5′ to 3′ direction, exon 1 or a portion thereof of RPS6KA5 fused to exon 8 or a portion thereof, and exons 9-29, of ALK. In some embodiments, the ALK-TG fusion nucleic acid molecule of the disclosure comprises, in the 5′ to 3′ direction, exons 1-9, and exon 10 or a portion thereof, of TG fused to exon 19 or a portion thereof, and exons 20-29, of ALK. In some embodiments, the ALK-LRRFIP2 fusion nucleic acid molecule of the disclosure comprises, in the 5′ to 3′ direction, exons 1-24, and exon 25 or a portion thereof, of LRRFIP2 fused to exon 20 or a portion thereof, and exons 21-29, of ALK. In some embodiments, the ALK-MYO5C fusion nucleic acid molecule of the disclosure comprises, in the 5′ to 3′ direction, exons 1-29, and exon 30 or a portion thereof, of MYO5C fused to exon 20 or a portion thereof, and exons 21-29, of ALK. In some embodiments, the ALK-AGAP1 fusion nucleic acid molecule of the disclosure comprises, in the 5′ to 3′ direction, exons 1-5, and exon 6 or a portion thereof, of AGAP1 fused to exon 18 or a portion thereof, and exons 19-29, of ALK. In some embodiments, the ALK-MED13L fusion nucleic acid molecule of the disclosure comprises, in the 5′ to 3′ direction, exon 1 or a portion thereof of ALK fused to exon 6 or a portion thereof, and exons 7-31, of MED13L. In some embodiments, the ALK-MTBP fusion nucleic acid molecule of the disclosure comprises, in the 5′ to 3′ direction, exons 1-16, and exon 17 or a portion thereof, of ALK fused to exon 12 or a portion thereof, and exons 13-22, of MTBP. In some embodiments, the ALK-SLC30A6 fusion nucleic acid molecule of the disclosure comprises, in the 5′ to 3′ direction, exons 1-17, and exon 18 or a portion thereof, of ALK fused to exon 4 or a portion thereof, and exons 5-14, of SLC30A6. In some embodiments, the ALK-GMCL1 fusion nucleic acid molecule of the disclosure comprises, in the 5′ to 3′ direction, exons 1-26, and exon 27 or a portion thereof, of ALK fused to exon 7 or a portion thereof, and exons 8-14, of GMCL1. In some embodiments, the ALK-AGAP1 fusion nucleic acid molecule of the disclosure comprises, in the 5′ to 3′ direction, exons 1-18, and exon 19 or a portion thereof, of ALK fused to exon 7 or a portion thereof, and exons 8-17, of AGAP1. In some embodiments, the ALK-ZNF454 fusion nucleic acid molecule of the disclosure comprises, in the 5′ to 3′ direction, exons 1-18, and exon 19 or a portion thereof, of ALK fused to exon 5 or a portion thereof of ZNF454. In some embodiments, the ALK-TTC28 fusion nucleic acid molecule of the disclosure comprises, in the 5′ to 3′ direction, exon 1 or a portion thereof of TTC28 fused to exon 14 or a portion thereof, and exons 15-29, of ALK. In some embodiments, the ALK-NINJ2 fusion nucleic acid molecule of the disclosure comprises, in the 5′ to 3′ direction, exon 1 or a portion thereof of NINJ2 fused to exon 14 or a portion thereof, and exons 15-29, of ALK. In some embodiments, the ALK-UTRN fusion nucleic acid molecule of the disclosure comprises, in the 5′ to 3′ direction, exons 1-71, and exon 72 or a portion thereof, of UTRN fused to exon 19 or a portion thereof, and exons 20-29, of ALK. In some embodiments, the ALK-ACTN4 fusion nucleic acid molecule of the disclosure comprises, in the 5′ to 3′ direction, exons 1-6, and exon 7 or a portion thereof, of ACTN4 fused to exon 20 or a portion thereof, and exons 21-29, of ALK. In some embodiments, the ALK-CPSF7 fusion nucleic acid molecule of the disclosure comprises, in the 5′ to 3′ direction, exons 1-4, and exon 5 or a portion thereof, of CPSF7 fused to exon 20 or a portion thereof, and exons 21-29, of ALK. In some embodiments, the ALK-SLC25A13 fusion nucleic acid molecule of the disclosure comprises, in the 5′ to 3′ direction, exons 1-9, and exon 10 or a portion thereof, of SLC25A13 fused to exon 20 or a portion thereof, and exons 21-29, of ALK. In some embodiments, the ALK-CTNND1 fusion nucleic acid molecule of the disclosure comprises, in the 5′ to 3′ direction, exons 1-15, and exon 16 or a portion thereof, of CTNND1 fused to exon 20 or a portion thereof, and exons 21-29, of ALK. In some embodiments, the ALK-KLC4 fusion nucleic acid molecule of the disclosure comprises, in the 5′ to 3′ direction, exons 1-8, and exon 9 or a portion thereof, of KLC4 fused to exon 20 or a portion thereof, and exons 21-29, of ALK. In some embodiments, the ALK-BTBD9 fusion nucleic acid molecule of the disclosure comprises, in the 5′ to 3′ direction, exons 1-4, and exon 5 or a portion thereof, of BTBD9 fused to exon 20 or a portion thereof, and exons 21-29, of ALK. In some embodiments, the ALK-CPQ fusion nucleic acid molecule of the disclosure comprises, in the 5′ to 3′ direction, exons 1-6, and exon 7 or a portion thereof, of CPQ fused to exon 20 or a portion thereof, and exons 21-29, of ALK. In some embodiments, the ALK-KIF5C fusion nucleic acid molecule of the disclosure comprises, in the 5′ to 3′ direction, exons 1-10, and exon 11 or a portion thereof, of KIF5C fused to exon 20 or a portion thereof, and exons 21-29, of ALK. In some embodiments, the ALK-MAGOHB fusion nucleic acid molecule of the disclosure comprises, in the 5′ to 3′ direction, exon 1 or a portion thereof of MAGOHB fused to exon 20 or a portion thereof, and exons 21-29, of ALK. In some embodiments, the ALK-COL3A1 fusion nucleic acid molecule of the disclosure comprises, in the 5′ to 3′ direction, exons 1-47, and exon 48 or a portion thereof, of COL3A1 fused to exon 19 or a portion thereof, and exons 20-29, of ALK. In some embodiments, the ALK-OPRM1 fusion nucleic acid molecule of the disclosure comprises, in the 5′ to 3′ direction, exons 1-2, and exon 3 or a portion thereof, of OPRM1 fused to exon 20 or a portion thereof, and exons 21-29, of ALK. In some embodiments, the ALK-GPN1 fusion nucleic acid molecule of the disclosure comprises, in the 5′ to 3′ direction, exon 1 or a portion thereof of GPN1 fused to exon 16 or a portion thereof, and exons 17-29, of ALK. In some embodiments, the ALK-SEC16B fusion nucleic acid molecule of the disclosure comprises, in the 5′ to 3′ direction, exons 1-12, and exon 13 or a portion thereof, of SEC16B fused to exon 14 or a portion thereof, and exons 15-29, of ALK. In some embodiments, the ALK-UBE2L3 fusion nucleic acid molecule of the disclosure comprises, in the 5′ to 3′ direction, exon 1 or a portion thereof of UBE2L3 fused to exon 18 or a portion thereof, and exons 19-29, of ALK. In some embodiments, the ALK-METTL25 fusion nucleic acid molecule of the disclosure comprises, in the 5′ to 3′ direction, exons 1-7, and exon 8 or a portion thereof, of METTL25 fused to exon 20 or a portion thereof, and exons 21-29, of ALK. In some embodiments, the ALK-CYS1 fusion nucleic acid molecule of the disclosure comprises, in the 5′ to 3′ direction, exon 1 or a portion thereof of CYS1 fused to exon 20 or a portion thereof, and exons 21-29, of ALK. In some embodiments, the ALK-ABCB11 fusion nucleic acid molecule of the disclosure comprises, in the 5′ to 3′ direction, exons 1-25, and exon 26 or a portion thereof, of ABCB11 fused to exon 20 or a portion thereof, and exons 21-29, of ALK. In some embodiments, the ALK-INTS9 fusion nucleic acid molecule of the disclosure comprises, in the 5′ to 3′ direction, exons 1-7, and exon 8 or a portion thereof, of INTS9 fused to exon 20 or a portion thereof, and exons 21-29, of ALK. In some embodiments, the ALK-CIB4 fusion nucleic acid molecule of the disclosure comprises, in the 5′ to 3′ direction, exons 1-2, and exon 3 or a portion thereof, of CIB4 fused to exon 20 or a portion thereof, and exons 21-29, of ALK. In some embodiments, the ALK-WDR92 fusion nucleic acid molecule of the disclosure comprises, in the 5′ to 3′ direction, exons 1-6, and exon 7 or a portion thereof, of WDR92 fused to exon 2 or a portion thereof, and exons 3-29 of ALK. In some embodiments, the ALK-OTX1 fusion nucleic acid molecule of the disclosure comprises, in the 5′ to 3′ direction, exons 1-18, and exon 19 or a portion thereof, of ALK fused to exon 5 or a portion thereof of OTX1. In some embodiments, the ALK-PDCD10 fusion nucleic acid molecule of the disclosure comprises, in the 5′ to 3′ direction, exons 1-14, and exon 15 or a portion thereof, of ALK fused to exon 3 or a portion thereof, and exons 4-9, of PDCD10. In some embodiments, the ALK-PTGER4 fusion nucleic acid molecule of the disclosure comprises, in the 5′ to 3′ direction, exons 1-18, and exon 19 or a portion thereof, of ALK fused to exon 3 or a portion thereof of PTGER4. In some embodiments, the ALK-PTPRJ fusion nucleic acid molecule of the disclosure comprises, in the 5′ to 3′ direction, exons 1-18, and exon 19 or a portion thereof, of ALK fused to exon 2 or a portion thereof, and exons 3-25, of PTPRJ. In some embodiments, the ALK-ZSWIM2 fusion nucleic acid molecule of the disclosure comprises, in the 5′ to 3′ direction, exons 1-18, and exon 19 or a portion thereof, of ALK fused to exon 6 or a portion thereof, and exons 7-9, of ZSWIM2. In some embodiments, the ALK-FHOD3 fusion nucleic acid molecule of the disclosure comprises, in the 5′ to 3′ direction, exons 1-17, and exon 18 or a portion thereof, of ALK fused to exon 10 or a portion thereof, and exons 11-25, of FHOD3. In some embodiments, the ALK-FILIP1L fusion nucleic acid molecule of the disclosure comprises, in the 5′ to 3′ direction, exons 1-17, and exon 18 or a portion thereof, of ALK fused to exon 2 or a portion thereof, and exons 3-6, of FILP1L. In some embodiments, the ALK-ITGA6 fusion nucleic acid molecule of the disclosure comprises, in the 5′ to 3′ direction, exons 1-18, and exon 19 or a portion thereof, of ALK fused to exon 2 or a portion thereof, and exons 3-26, of ITGA6. In some embodiments, the ALK-KCTD18 fusion nucleic acid molecule of the disclosure comprises, in the 5′ to 3′ direction, exons 1-18, and exon 19 or a portion thereof, of ALK fused to exon 2 or a portion thereof, and exons 3-7, of KCTD18. In some embodiments, the ALK-MAMDC4 fusion nucleic acid molecule of the disclosure comprises, in the 5′ to 3′ direction, exons 1-19, and exon 20 or a portion thereof, of ALK fused to exon 16 or a portion thereof, and exons 17-27, of MAMDC4. In some embodiments, the ALK-PELI1 fusion nucleic acid molecule of the disclosure comprises, in the 5′ to 3′ direction, exon 1 or a portion thereof, of PELI1 fused to exon 20 or a portion thereof, and exons 21-29, of ALK. In some embodiments, the ALK-PELI1 fusion nucleic acid molecule of the disclosure comprises, in the 5′ to 3′ direction, the 5′ UTR, or a portion thereof, of PELI1 (e.g., as encoded by exon 1 of PELI1 or a portion thereof), fused to exon 20 or a portion thereof, and exons 21-29, of ALK. In some embodiments, the ALK-LINC00535 fusion nucleic acid molecule of the disclosure comprises, in the 5′ to 3′ direction, exons 1-4, and exon 5 or a portion thereof, of LINC00535 fused to exon 20 or a portion thereof, and exons 21-29, of ALK. In some embodiments, the ALK-LINC00535 fusion nucleic acid molecule of the disclosure comprises, in the 5′ to 3′ direction, a UTR, or a portion thereof, of LINC00535 (e.g., as encoded by exons 1-5 of LINC00535 or a portion thereof), fused to exon 20 or a portion thereof, and exons 21-29, of ALK. In some embodiments, the ALK-CTBP1 fusion nucleic acid molecule of the disclosure comprises, in the 5′ to 3′ direction, exons 1-8, and exon 9 or a portion thereof, of CTBP1 fused to exon 20 or a portion thereof, and exons 21-29 of ALK. In some embodiments, the ALK-CARMIL1 fusion nucleic acid molecule of the disclosure comprises, in the 5′ to 3′ direction, exons 1-26, and exon 27 or a portion thereof, of CARMIL1 fused to exon 20 or a portion thereof, and exons 21-29 of ALK. In some embodiments, the ALK-ZNF513 fusion nucleic acid molecule of the disclosure comprises, in the 5′ to 3′ direction, exon 1 or a portion thereof of ZNF513 fused to exon 1 or a portion thereof, and exons 2-29, of ALK. In some embodiments, the ALK-TMCO3 fusion nucleic acid molecule of the disclosure comprises, in the 5′ to 3′ direction, exons 1-5, and exon 6 or a portion thereof, of TMCO3 fused to exon 11 or a portion thereof, and exons 12-29, of ALK. In some embodiments, the ALK-SRSF7 fusion nucleic acid molecule of the disclosure comprises, in the 5′ to 3′ direction, exons 1-3, and exon 4 or a portion thereof, of SRSF7 fused to exon 18 or a portion thereof, and exons 19-29, of ALK. In some embodiments, the ALK-CASP8 fusion nucleic acid molecule of the disclosure comprises, in the 5′ to 3′ direction, exons 1-9, and exon 10 or a portion thereof, of CASP8 fused to exon 2 or a portion thereof, and exons 3-29, of ALK. In some embodiments, the ALK-CYP51A1 fusion nucleic acid molecule of the disclosure comprises, in the 5′ to 3′ direction, exons 1-8, and exon 9 or a portion thereof, of CYP51A1 fused to exon 3 or a portion thereof, and exons 4-29, of ALK. In some embodiments, the ALK-GPR113 fusion nucleic acid molecule of the disclosure comprises, in the 5′ to 3′ direction, exon 1 or a portion thereof of GPR113 fused to exon 19 or a portion thereof, and exons 20-29 of ALK. In some embodiments, the ALK-HADHA fusion nucleic acid molecule of the disclosure comprises, in the 5′ to 3′ direction, exons 1-4, and exon 5 or a portion thereof, of HADHA fused to exon 5 or a portion thereof, and exons 6-29, of ALK. In some embodiments, the ALK-LRRFIP2 fusion nucleic acid molecule of the disclosure comprises, in the 5′ to 3′ direction, exons 1-21, and exon 22 or a portion thereof, of LRRFIP2 fused to exon 20 or a portion thereof, and exons 21-29 of ALK. In some embodiments, the ALK-MYH10 fusion nucleic acid molecule of the disclosure comprises, in the 5′ to 3′ direction, exons 1-37, and exon 38 or a portion thereof, of MYH10 fused to exon 20 or a portion thereof, and exons 21-29 of ALK. In some embodiments, the ALK-PDE3A fusion nucleic acid molecule of the disclosure comprises, in the 5′ to 3′ direction, exons 1-9, and exon 10 or a portion thereof, of PDE3A fused to exon 8 or a portion thereof, and exons 9-29, of ALK. In some embodiments, the ALK-PLEC fusion nucleic acid molecule of the disclosure comprises, in the 5′ to 3′ direction, exons 1-8, and exon 9 or a portion thereof, of PLEC fused to exon 20 or a portion thereof, and exons 21-29 of ALK. In some embodiments, the ALK-QKI fusion nucleic acid molecule of the disclosure comprises, in the 5′ to 3′ direction, exon 1, and exon 2 or a portion thereof, of QKI fused to exon 20 or a portion thereof, and exons 21-29 of ALK. In some embodiments, the ALK-SASH1 fusion nucleic acid molecule of the disclosure comprises, in the 5′ to 3′ direction, exons 1-13, and exon 14 or a portion thereof, of SASH1 fused to exon 18 or a portion thereof, and exons 19-29, of ALK. In some embodiments, the ALK-SRSF7 fusion nucleic acid molecule of the disclosure comprises, in the 5′ to 3′ direction, exons 1-4, and exon 5 or a portion thereof, of SRSF7 fused to exon 18 or a portion thereof, and exons 19-29, of ALK. In some embodiments, the ALK-VASP fusion nucleic acid molecule of the disclosure comprises, in the 5′ to 3′ direction, exons 1-3, and exon 4 or a portion thereof, of VASP fused to exon 7 or a portion thereof, and exons 8-29, of ALK. In some embodiments, the ALK-ZNF446 fusion nucleic acid molecule of the disclosure comprises, in the 5′ to 3′ direction, exons 1-6, and exon 7 or a portion thereof, of ZNF446 fused to exon 20 or a portion thereof, and exons 21-29 of ALK. In some embodiments, the ALK-SOX13 fusion nucleic acid molecule of the disclosure comprises, in the 5′ to 3′ direction, exon 1 or a portion thereof of SOX13 fused to exon 18 or a portion thereof, and exons 19-29, of ALK. In some embodiments, the ALK-SOX13 fusion nucleic acid molecule of the disclosure comprises, in the 5′ to 3′ direction, the 5′ UTR, or a portion thereof, of SOX13 (e.g., as encoded by exon 1 of SOX13 or a portion thereof), fused to exon 18 or a portion thereof, and exons 19-29, of ALK. In some embodiments, the ALK-YPEL5 fusion nucleic acid molecule of the disclosure comprises, in the 5′ to 3′ direction, exon 1 or a portion thereof of YPEL5 fused to exon 18 or a portion thereof, and exons 19-29, of ALK. In some embodiments, the ALK-YPEL5 fusion nucleic acid molecule of the disclosure comprises, in the 5′ to 3′ direction, the 5′ UTR, or a portion thereof, of YPEL5 (e.g., as encoded by exon 1 of YPEL5 or a portion thereof), fused to exon 18 or a portion thereof, and exons 19-29, of ALK. In some embodiments, the ALK-CAPN14 fusion nucleic acid molecule of the disclosure comprises, in the 5′ to 3′ direction, exons 1-13, and exon 14 or a portion thereof, of ALK fused to exon 3 or a portion thereof, and exons 4-22, of CAPN14. In some embodiments, the ALK-MAP3K9 fusion nucleic acid molecule of the disclosure comprises, in the 5′ to 3′ direction, exon 1 or a portion thereof of ALK fused to exon 4 or a portion thereof, and exons 5-13, of MAP3K9. In some embodiments, the ALK-SNX17 fusion nucleic acid molecule of the disclosure comprises, in the 5′ to 3′ direction, exons 1-12, and exon 13 or a portion thereof, of ALK fused to exon 3 or a portion thereof, and exons 4-15, of SNX17. In some embodiments, the ALK-HS1BP3 fusion nucleic acid molecule of the disclosure comprises, in the 5′ to 3′ direction, exons 1-18, and exon 19 or a portion thereof, of ALK fused to exon 4 or a portion thereof, and exons 5-7, of HS1BP3. In some embodiments, the ALK-CREBBP fusion nucleic acid molecule of the disclosure comprises, in the 5′ to 3′ direction, exons 1-2, and exon 3 or a portion thereof, of ALK fused to exon 2 or a portion thereof, and exons 3-31, of CREBBP. In some embodiments, the ALK-PAQR4 fusion nucleic acid molecule of the disclosure comprises, in the 5′ to 3′ direction, exons 1-2, and exon 3 or a portion thereof, of ALK fused to exon 1 or a portion thereof, and exons 2-3, of PAQR4. In some embodiments, the ALK-APH1A fusion nucleic acid molecule of the disclosure comprises, in the 5′ to 3′ direction, exons 1-3, and exon 4 or a portion thereof, of ALK fused to exon 4 or a portion thereof, and exons 5-6, of APHA.

[0235] In some embodiments, an ALK fusion nucleic acid molecule of the disclosure comprises the corresponding nucleotide sequence as listed in Table 7, or a nucleotide sequence having at least about 70% (e.g., any of about 70%, 71%, 72%, 73%, 74%, 75%, 76%, 77%, 78%, 79%, 80%, 81%, 82%, 83%, 84%, 85%, 86%, 87%, 88%, 89%, 90%, 91%, 92%, 93%, 94%, 95%, 96%, 97%, 98%, 99%, or 100%) sequence homology thereto.

TABLE 7
ALK fusion nucleic acid molecule nucleotide sequences.

| ALK | | |
|---|---|---|
| Fusion | | |
| Nucleic | | |
| Acid | | SEQ ID |
| Molecule | ALK Fusion Nucleic Acid Molecule Nucleotide Sequence | NO |
| ALK- | ATGATGAGCTTTGTGCAAAAGGGGAGCTGGCTACTTCTCGCTCTGCTTCATCCCACTA | 1 |
| COL3A1 | TTATTTTGGCACAACAGGAAGCTGTTGAAGGAGGATGTTCCCATCTTGGTCAGTCCTA | |
| | TGCGGATAGAGATGTCTGGAAGCCAGAACCATGCCAAATATGTGTCTGTGACTCAGGA | |
| | TCCGTTCTCTGCGATGACATAATATGTGACGATCAAGAATTAGACTGCCCCAACCCAG | |
| | AAATTCCATTTGGAGAATGTTGTGCAGTTTGCCCACAGCCTCCAACTGCTCCTACTCG | |
| | CCCTCCTAATGGTCAAGGACCTCAAGGCCCCAAGGGAGATCCAGGCCCTCCTGGTATT | |
| | CCTGGGAGAAATGGTGACCCTGGTATTCCAGGACAACCAGGGTCCCCTGGTTCTCCTG | |
| | GCCCCCCTGGAATCTGTGAATCATGCCCTACTGGTCCTCAGAACTATTCTCCCCAGTA | |
| | TGATTCATATGATGTCAAGTCTGGAGTAGCAGTAGGAGGACTCGCAGGCTATCCTGGA | |
| | CCAGCTGGCCCCCCAGGCCCTCCCGGTCCCCCTGGTACATCTGGTCATCCTGGTTCCC | |
| | CTGGATCTCCAGGATACCAAGGACCCCCTGGTGAACCTGGGCAAGCTGGTCCTTCAGG | |
| | CCCTCCAGGACCTCCTGGTGCTATAGGTCCATCTGGTCCTGCTGGAAAAGATGGAGAA | |
| | TCAGGTAGACCCGGACGACCTGGAGAGCGAGGATTGCCTGGACCTCCAGGTATCAAAG | |
| | GTCCAGCTGGGATACCTGGATTCCCTGGTATGAAAGGACACAGAGGCTTCGATGGACG | |
| | AAATGGAGAAAAGGGTGAAACAGGTGCTCCTGGATTAAAGGGTGAAAATGGTCTTCCA | |
| | GGCGAAAATGGAGCTCCTGGACCCATGGGTCCAAGAGGGGCTCCTGGTGAGCGAGGAC | |
| | GGCCAGGACTTCCTGGGGCTGCAGGTGCTCGGGGTAATGACGGTGCTCGAGGCAGTGA | |
| | TGGTCAACCAGGCCCTCCTGGTCCTCCTGGAACTGCCGGATTCCCTGGATCCCCTGGT | |
| | GCTAAGGGTGAAGTTGGACCTGCAGGGTCTCCTGGTTCAAATGGTGCCCCTGGACAAA | |
| | GAGGAGAACCTGGACCTCAGGGACACGCTGGTGCTCAAGGTCCTCCTGGCCCTCCTGG | |
| | GATTAATGGTAGTCCTGGTGGTAAAGGCGAAATGGGTCCCGCTGGCATTCCTGGAGCT | |
| | CCTGGACTGATGGGAGCCCGGGGTCCTCCAGGACCAGCCGGTGCTAATGGTGCTCCTG | |
| | GACTGCGAGGTGGTGCAGGTGAGCCTGGTAAGAATGGTGCCAAAGGAGAGCCCGGACC | |
| | ACGTGGTGAACGCGGTGAGGCTGGTATTCCAGGTGTTCCAGGAGCTAAAGGCGAAGAT | |
| | GGCAAGGATGGATCACCTGGAGAACCTGGTGCAAATGGGCTTCCAGGAGCTGCAGGAG | |
| | AAAGGGGTGCCCCTGGGTTCCGAGGACCTGCTGGACCAAATGGCATCCCAGGAGAAAA | |
| | GGGTCCTGCTGGAGAGCGTGGTGCTCCAGGCCCTGCAGGGCCCAGAGGAGCTGCTGGA | |
| | GAACCTGGCAGAGATGGCGTCCCTGGAGGTCCAGGAATGAGGGGCATGCCCGGAAGTC | |
| | CAGGAGGACCAGGAAGTGATGGGAAACCAGGGCCTCCCGGAAGTCAAGGAGAAAGTGG | |
| | TCGACCAGGTCCTCCTGGGCCATCTGGTCCCCGAGGTCAGCCTGGTGTCATGGGCTTC | |
| | CCCGGTCCTAAAGGAAATGATGGTGCTCCTGGTAAGAATGGAGAACGAGGTGGCCCTG | |
| | GAGGACCTGGCCCTCAGGGTCCTCCTGGAAAGAATGGTGAAACTGGACCTCAGGGACC | |
| | CCCAGGGCCTACTGGGCCTGGTGGTGACAAAGGAGACACAGGACCCCCTGGTCCACAA | |
| | GGATTACAAGGCTTGCCTGGTACAGGTGGTCCTCCAGGAGAAAATGGAAAACCTGGGG | |
| | AACCAGGTCCAAAGGGTGATGCCGGTGCACCTGGAGCTCCAGGAGGCAAGGGTGATGC | |
| | TGGTGCCCCTGGTGAACGTGGACCTCCTGGATTGGCAGGGGCCCCAGGACTTAGAGGT | |
| | GGAGCTGGTCCCCCTGGTCCCGAAGGAGGAAAGGGTGCTGCTGGTCCTCCTGGGCCAC | |
| | CTGGTGCTGCTGGTACTCCTGGTCTGCAAGGAATGCCTGGAGAAAGAGGAGGTCTTGG | |
| | AAGTCCTGGTCCAAAGGGTGACAAGGGTGAACCAGGCGGTCCAGGTGCTGATGGTGTC | |
| | CCAGGGAAAGATGGCCCAAGGGGTCCTACTGGTCCTATTGGTCCTCCTGGCCCAGCTG | |
| | GCCAGCCTGGAGATAAGGGTGAAGGTGGTGCCCCCGGACTTCCAGGTATAGCTGGACC | |
| | TCGTGGTAGCCCTGGTGAGAGAGGTGAAACTGGCCCTCCAGGACCTGCTGGTTTCCCT | |
| | GGTGCTCCTGGACAGAATGGTGAACCTGGTGGTAAAGGAGAAAGAGGGGCTCCGGGTG | |
| | AGAAAGGTGAAGGAGGCCCTCCTGGAGTTGCAGGACCCCCTGGAGGTTCTGGACCTGC | |
| | TGGTCCTCCTGGTCCCCAAGGTGTCAAAGGTGAACGTGGCAGTCCTGGTGGACCTGGT | |
| | GCTGCTGGCTTCCCTGGTGCTCGTGGTCTTCCTGGTCCTCCTGGTAGTAATGGTAACC | |
| | CAGGACCCCCAGGTCCCAGCGGTTCTCCAGGCAAGGATGGGCCCCCAGGTCCTGCGGG | |
| | TAACACTGGTGCTCCTGGCAGCCCTGGAGTGTCTGGACCAAAAGGTGATGCTGGCCAA | |
| | CCAGGAGAGAAGGGATCGCCTGGTGCCCAGGGCCCACCAGGAGCTCCAGGCCCACTTG | |
| | GGATTGCTGGGATCACTGGAGCACGGGGTCTTGCAGGACCACCAGGCATGCCAGGTCC | |
| | TAGGGGAAGCCCTGGCCCTCAGGGTGTCAAGGGTGAAAGTGGGAAACCAGGAGCTAAC | |
| | GGTCTCAGTGGAGAACGTGGTCCCCCTGGACCCCAGGGTCTTCCTGGTCTGGCTGGTA | |
| | CAGCTGGTGAACCTGGAAGAGATGGAAACCCTGGATCAGATGGTCTTCCAGGCCGAGA | |
| | TGGATCTCCTGGTGGCAAGGGTGATCGTGGTGAAAATGGCTCTCCTGGTGCCCCTGGC | |
| | GCTCCTGGTCATCCAGGCCCACCTGGTCCTGTCGGTCCAGCTGGAAAGAGTGGTGACA | |
| | GAGGAGAAAGTGGCCCTGCTGGCCCTGCTGGTGCTCCCGGTCCTGCTGGTTCCCGAGG | |
| | TGCTCCTGGTCCTCAAGGCCCACGTGGTGACAAAGGTGAAACAGGTGAACGTGGAGCT | |
| | GCTGGCATCAAAGGACATCGAGGATTCCCTGGTAATCCAGGTGCCCCAGGTTCTCCAG | |
| | GCCCTGCTGGTCAGCAGGGTGCAATCGGCAGTCCAGGACCTGCAGGCCCCAGAGGACC | |
| | TGTTGGACCCAGTGGACCTCCTGGCAAAGATGGAACCAGTGGACATCCAGGTCCCATT | |
| | GGACCACCAGGGCCTCGAGGTAACAGAGGTGAAAGAGGATCTGAGGGCTCCCCAGGCC | |
| | ACCCAGGGCAACCAGGCCCTCCTGGACCTCCTGGTGCCCCTGGTCCTTGCTGTGGTGG | |
| | TGTTGGAGCCGCTGCCATTGCTGGGATTGGAGGTGAAAAAGCTGGCGGTTTTGCCCCG | |
| | TATTATGGAGATGAACCAATGGATTTCAAAATCAACACCGATGAGATTATGACTTCAC | |
| | TCAAGTCTGTTAATGGACAAATAGAAAGCCTCATTAGTCCTGATGGTTCTCGTAAAAA | |
| | CCCCGCTAGAAACTGCAGAGACCTGAAATTCTGCCATCCTGAACTCAAGAGTGTGTCA | |
| | CCCACCCCGGAGCCACACCTGCCACTCTCGCTGATCCTCTCTGTGGTGACCTCTGCCC | |
| | TCGTGGCCGCCCTGGTCCTGGCTTTCTCCGGCATCATGATTGTGTACCGCCGGAAGCA | |
| | CCAGGAGCTGCAAGCCATGCAGATGGAGCTGCAGAGCCCTGAGTACAAGCTGAGCAAG | |
| | CTCCGCACCTCGACCATCATGACCGACTACAACCCCAACTACTGCTTTGCTGGCAAGA | |
| | CCTCCTCCATCAGTGACCTGAAGGAGGTGCCGCGGAAAAACATCACCCTCATTCGGGG | |
| | TCTGGGCCATGGCGCCTTTGGGGAGGTGTATGAAGGCCAGGTGTCCGGAATGCCCAAC | |
| | GACCCAAGCCCCCTGCAAGTGGCTGTGAAGACGCTGCCTGAAGTGTGCTCTGAACAGG | |
| | ACGAACTGGATTTCCTCATGGAAGCCCTGATCATCAGCAAATTCAACCACCAGAACAT | |
| | TGTTCGCTGCATTGGGGTGAGCCTGCAATCCCTGCCCCGGTTCATCCTGCTGGAGCTC | |
| | ATGGCGGGGGGAGACCTCAAGTCCTTCCTCCGAGAGACCCGCCCTCGCCCGAGCCAGC | |
| | CCTCCTCCCTGGCCATGCTGGACCTTCTGCACGTGGCTCGGGACATTGCCTGTGGCTG | |
| | TCAGTATTTGGAGGAAAACCACTTCATCCACCGAGACATTGCTGCCAGAAACTGCCTC | |
| | TTGACCTGTCCAGGCCCTGGAAGAGTGGCCAAGATTGGAGACTTCGGGATGGCCCGAG | |
| | ACATCTACAGGGCGAGCTACTATAGAAAGGGAGGCTGTGCCATGCTGCCAGTTAAGTG | |
| | GATGCCCCCAGAGGCCTTCATGGAAGGAATATTCACTTCTAAAACAGACACATGGTCC | |
| | TTTGGAGTGCTGCTATGGGAAATCTTTTCTCTTGGATATATGCCATACCCCAGCAAAA | |
| | GCAACCAGGAAGTTCTGGAGTTTGTCACCAGTGGAGGCCGGATGGACCCACCCAAGAA | |
| | CTGCCCTGGGCCTGTATACCGGATAATGACTCAGTGCTGGCAACATCAGCCTGAAGAC | |
| | AGGCCCAACTTTGCCATCATTTTGGAGAGGATTGAATACTGCACCCAGGACCCGGATG | |
| | TAATCAACACCGCTTTGCCGATAGAATATGGTCCACTTGTGGAAGAGGAAGAGAAAGT | |
| | GCCTGTGAGGCCCAAGGACCCTGAGGGGGTTCCTCCTCTCCTGGTCTCTCAACAGGCA | |
| | AAACGGGAGGAGGAGCGCAGCCCAGCTGCCCCACCACCTCTGCCTACCACCTCCTCTG | |
| | GCAAGGCTGCAAAGAAACCCACAGCTGCAGAGATCTCTGTTCGAGTCCCTAGAGGGCC | |
| | GGCCGTGGAAGGGGGACACGTGAATATGGCATTCTCTCAGTCCAACCCTCCTTCGGAG | |
| | TTGCACAAGGTCCACGGATCCAGAAACAAGCCCACCAGCTTGTGGAACCCAACGTACG | |
| | GCTCCTGGTTTACAGAGAAACCCACCAAAAAGAATAATCCTATAGCAAAGAAGGAGCC | |
| | ACACGACAGGGGTAACCTGGGGCTGGAGGGAAGCTGTACTGTCCCACCTAACGTTGCA | |
| | ACTGGGAGACTTCCGGGGGCCTCACTGCTCCTAGAGCCCTCTTCGCTGACTGCCAATA | |
| | TGAAGGAGGTACCTCTGTTCAGGCTACGTCACTTCCCTTGTGGGAATGTCAATTACGG | |
| | CTACCAGCAACAGGGCTTGCCCTTAGAAGCCGCTACTGCCCCTGGAGCTGGTCATTAC | |
| | GAGGATACCATTCTGAAAAGCAAGAATAGCATGAACCAGCCTGGGCCCTGA | |
| ALK- | ATGTCTGGAGAAGTGCGTTTGAGGCAGTTGGAGCAGTTTATTTTGGACGGGCCCGCTC | 2 |
| CDC42BPA | AGACCAATGGGCAGTGCTTCAGTGTGGAGACATTACTGGATATACTCATCTGCCTTTA | |
| | TGATGAATGCAATAATTCTCCATTGAGAAGAGAGAAGAACATTCTCGAATACCTAGAA | |
| | TGGGCTAAACCATTTACTTCTAAAGTGAAACAAATGCGATTACATAGAGAAGACTTTG | |
| | AAATATTAAAGGTGATTGGTCGAGGAGCTTTTGGGGAGGTTGCTGTAGTAAAACTAAA | |
| | AAATGCAGATAAAGTGTTTGCCATGAAAATATTGAATAAATGGGAAATGCTGAAAAGA | |
| | GCTGAGACAGCATGTTTTCGTGAAGAAAGGGATGTATTAGTGAATGGAGACAATAAAT | |
| | GGATTACAACCTTGCACTATGCTTTCCAGGATGACAATAACTTATACCTGGTTATGGA | |
| | TTATTATGTTGGTGGGGATTTGCTTACTCTACTCAGCAAATTTGAAGATAGATTGCCT | |
| | GAAGATATGGCTAGATTTTACTTGGCTGAGATGGTGATAGCAATTGACTCAGTTCATC | |
| | AGCTACATTATGTACACAGAGACATTAAACCTGACAATATACTGATGGATATGAATGG | |
| | ACATATTCGGTTAGCAGATTTTGGTTCTTGTCTGAAGCTGATGGAAGATGGAACGGTT | |
| | CAGTCCTCAGTGGCTGTAGGAACTCCAGATTATATCTCTCCTGAAATCCTTCAAGCCA | |
| | TGGAAGATGGAAAAGGGAGATATGGACCTGAATGTGACTGGTGGTCTTTGGGGGTCTG | |
| | TATGTATGAAATGCTTTACGGAGAAACACCATTTTATGCAGAATCGCTGGTGGAGACA | |
| | TACGGAAAAATCATGAACCACAAAGAGAGGTTTCAGTTTCCAGCCCAAGTGACTGATG | |
| | TGTCTGAAAATGCTAAGGATCTTATTCGAAGGCTCATTTGTAGCAGAGAACATCGACT | |
| | TGGTCAAAATGGAATAGAAGACTTTAAGAAACACCCATTTTTCAGTGGAATTGATTGG | |
| | GATAATATTCGGAACTGTGAAGCACCTTATATTCCAGAAGTTAGTAGCCCAACAGATA | |
| | CATCGAATTTTGATGTAGATGATGATTGTTTAAAAAATTCTGAAACGATGCCCCCACC | |
| | AACACATACTGCATTTTCTGGCCACCATCTGCCATTTGTTGGTTTTACATATACTAGT | |
| | AGCTGTGTACTTTCTGATCGGAGCTGTTTAAGAGTTACGGCTGGTCCCACCTCACTGG | |
| | ATCTTGATGTTAATGTTCAGAGGACTCTAGACAACAACTTAGCAACTGAAGCTTATGA | |
| | AAGAAGAATTAAGCGCCTTGAGCAAGAAAAACTTGAACTCAGTAGAAAACTTCAAGAG | |
| | TCAACACAGACTGTCCAAGCTCTGCAGTATTCAACTGTTGATGGTCCACTAACAGCAA | |
| | GCAAAGATTTAGAAATAAAAAACTTAAAAGAAGAAATTGAAAAACTAAGAAAACAAGT | |
| | AACAGAATCAAGTCATTTGGAACAGCAACTTGAAGAAGCTAATGCTGTGAGGCAAGAA | |
| | CTAGATGATGCTTTTAGACAAATCAAGGCTTATGAAAAACAAATCAAAACGTTACAAC | |
| | AAGAAAGAGAAGATCTAAATAAGGAACTAGTCCAGGCTAGTGAGCGATTAAAAAACCA | |
| | ATCCAAAGAGCTGAAAGACGCACACTGTCAGAGGAAACTGGCCATGCAGGAATTCATG | |
| | GAGATCAATGAGCGGCTAACAGAATTGCACACCCAAAAACAGAAACTTGCTCGCCATG | |
| | TCCGAGATAAGGAAGAAGAGGTGGACCTGGTGATGCAAAAAGTTGAAAGCTTAAGGCA | |
| | AGAACTGCGCAGAACAGAAAGAGCCAAAAAAGAGCTGGAAGTTCATACAGAAGCTCTA | |
| | GCTGCTGAAGCATCTAAAGACAGGAAGCTACGTGAACAGAGTGAGCACTATTCTAAGC | |
| | AACTGGAAAATGAATTGGAGGGACTGAAGCAAAAACAAATTAGTTACTCACCAGGAGT | |
| | ATGCAGCATAGAACATCAGCAAGAGATAACCAAACTAAAGACTGATTTGGAAAAGAAA | |
| | AGTATCTTTTATGAAGAAGAATTATCTAAAAGAGAAGGAATACATGCAAATGAAATAA | |
| | AAAATCTTAAGAAAGAACTGCATGATTCAGAAGGTCAGCAACTTGCTCTCAACAAAGA | |
| | AATTATGATTTTAAAAGACAAATTGGAAAAAACCAGAAGAGAAAGTCAAAGTGAAAGG | |
| | GAGGAATTTGAAAGTGAGTTCAAACAACAATATGAACGAGAAAAAGTGTTGTTAACTG | |
| | AAGAAAATAAAAAGCTGACGAGTGAACTTGATAAGCTTACTACTTTGTATGAGAACTT | |
| | AAGTATACACAACCAGCAGTTAGAAGAAGAGGTTAAAGATCTAGCAGACAAGAAAGAA | |
| | TCAGTTGCACATTGGGAAGCCCAAATCACAGAAATAATTCAGTGGGTCAGCGATGAAA | |
| | AGGATGCACGAGGGTATCTTCAGGCCTTAGCTTCTAAAATGACTGAAGAATTGGAGGC | |
| | ATTAAGAAATTCCAGCTTGGGTACACGAGCAACAGATATGCCCTGGAAAATGCGTCGT | |
| | TTTGCGAAACTGGATATGTCAGCTAGACTGGAGTTGCAGTCGGCTCTGGATGCAGAAA | |
| | TAAGAGCCAAACAGGCCATCCAAGAAGAGTTGAATAAAGTTAAAGCATCTAATATCAT | |
| | AACAGAATGTAAACTAAAAGATTCAGAGAAGAAGAACTTGGAACTACTCTCAGAAATC | |
| | GAACAGCTGATAAAGGACACTGAAGAGCTTAGATCTGAAAAGGTGTACCGCCGGAAGC | |
| | ACCAGGAGCTGCAAGCCATGCAGATGGAGCTGCAGAGCCCTGAGTACAAGCTGAGCAA | |
| | GCTCCGCACCTCGACCATCATGACCGACTACAACCCCAACTACTGCTTTGCTGGCAAG | |
| | ACCTCCTCCATCAGTGACCTGAAGGAGGTGCCGCGGAAAAACATCACCCTCATTCGGG | |
| | GTCTGGGCCATGGCGCCTTTGGGGAGGTGTATGAAGGCCAGGTGTCCGGAATGCCCAA | |
| | CGACCCAAGCCCCCTGCAAGTGGCTGTGAAGACGCTGCCTGAAGTGTGCTCTGAACAG | |
| | GACGAACTGGATTTCCTCATGGAAGCCCTGATCATCAGCAAATTCAACCACCAGAACA | |
| | TTGTTCGCTGCATTGGGGTGAGCCTGCAATCCCTGCCCCGGTTCATCCTGCTGGAGCT | |
| | CATGGCGGGGGGAGACCTCAAGTCCTTCCTCCGAGAGACCCGCCCTCGCCCGAGCCAG | |
| | CCCTCCTCCCTGGCCATGCTGGACCTTCTGCACGTGGCTCGGGACATTGCCTGTGGCT | |
| | GTCAGTATTTGGAGGAAAACCACTTCATCCACCGAGACATTGCTGCCAGAAACTGCCT | |
| | CTTGACCTGTCCAGGCCCTGGAAGAGTGGCCAAGATTGGAGACTTCGGGATGGCCCGA | |
| | GACATCTACAGGGCGAGCTACTATAGAAAGGGAGGCTGTGCCATGCTGCCAGTTAAGT | |
| | GGATGCCCCCAGAGGCCTTCATGGAAGGAATATTCACTTCTAAAACAGACACATGGTC | |
| | CTTTGGAGTGCTGCTATGGGAAATCTTTTCTCTTGGATATATGCCATACCCCAGCAAA | |
| | AGCAACCAGGAAGTTCTGGAGTTTGTCACCAGTGGAGGCCGGATGGACCCACCCAAGA | |
| | ACTGCCCTGGGCCTGTATACCGGATAATGACTCAGTGCTGGCAACATCAGCCTGAAGA | |
| | CAGGCCCAACTTTGCCATCATTTTGGAGAGGATTGAATACTGCACCCAGGACCCGGAT | |
| | GTAATCAACACCGCTTTGCCGATAGAATATGGTCCACTTGTGGAAGAGGAAGAGAAAG | |
| | TGCCTGTGAGGCCCAAGGACCCTGAGGGGGTTCCTCCTCTCCTGGTCTCTCAACAGGC | |
| | AAAACGGGAGGAGGAGCGCAGCCCAGCTGCCCCACCACCTCTGCCTACCACCTCCTCT | |
| | GGCAAGGCTGCAAAGAAACCCACAGCTGCAGAGATCTCTGTTCGAGTCCCTAGAGGGC | |
| | CGGCCGTGGAAGGGGGACACGTGAATATGGCATTCTCTCAGTCCAACCCTCCTTCGGA | |
| | GTTGCACAAGGTCCACGGATCCAGAAACAAGCCCACCAGCTTGTGGAACCCAACGTAC | |
| | GGCTCCTGGTTTACAGAGAAACCCACCAAAAAGAATAATCCTATAGCAAAGAAGGAGC | |
| | CACACGACAGGGGTAACCTGGGGCTGGAGGGAAGCTGTACTGTCCCACCTAACGTTGC | |
| | AACTGGGAGACTTCCGGGGGCCTCACTGCTCCTAGAGCCCTCTTCGCTGACTGCCAAT | |
| | ATGAAGGAGGTACCTCTGTTCAGGCTACGTCACTTCCCTTGTGGGAATGTCAATTACG | |
| | GCTACCAGCAACAGGGCTTGCCCTTAGAAGCCGCTACTGCCCCTGGAGCTGGTCATTA | |
| | CGAGGATACCATTCTGAAAAGCAAGAATAGCATGAACCAGCCTGGGCCCTGA | |
| ALK- | ATGGAGCTCCAGGCAGCCCGCGCCTGCTTCGCCCTGCTGTGGGGCTGTGCGCTGGCCG | 3 |
| EPHA2 | CGGCCGCGGCGGCGCAGGGCAAGGAAGTGGTACTGCTGGACTTTGCTGCAGCTGGAGG | |
| | GGAGCTCGGCTGGCTCACACACCCGTATGGCAAAGGGTGGGACCTGATGCAGAACATC | |
| | ATGAATGACATGCCGATCTACATGTACTCCGTGTGCAACGTGATGTCTGGCGACCAGG | |
| | ACAACTGGCTCCGCACCAACTGGGTGTACCGAGGAGAGGCTGAGCGTATCTTCATTGA | |
| | GCTCAAGTTTACTGTACGTGACTGCAACAGCTTCCCTGGTGGCGCCAGCTCCTGCAAG | |
| | GAGACTTTCAACCTCTACTATGCCGAGTCGGACCTGGACTACGGCACCAACTTCCAGA | |
| | AGCGCCTGTTCACCAAGATTGACACCATTGCGCCCGATGAGATCACCGTCAGCAGCGA | |
| | CTTCGAGGCACGCCACGTGAAGCTGAACGTGGAGGAGCGCTCCGTGGGGCCGCTCACC | |
| | CGCAAAGGCTTCTACCTGGCCTTCCAGGATATCGGTGCCTGTGTGGCGCTGCTCTCCG | |
| | TCCGTGTCTACTACAAGAAGTGCCCCGAGCTGCTGCAGGGCCTGGCCCACTTCCCTGA | |
| | GACCATCGCCGGCTCTGATGCACCTTCCCTGGCCACTGTGGCCGGCACCTGTGTGGAC | |
| | CATGCCGTGGTGCCACCGGGGGGTGAAGAGCCCCGTATGCACTGTGCAGTGGATGGCG | |
| | AGTGGCTGGTGCCCATTGGGCAGTGCCTGTGCCAGGCAGGCTACGAGAAGGTGGAGGA | |
| | TGCCTGCCAGGTGTCACCCACCCCGGAGCCACACCTGCCACTCTCGCTGATCCTCTCT | |
| | GTGGTGACCTCTGCCCTCGTGGCCGCCCTGGTCCTGGCTTTCTCCGGCATCATGATTG | |
| | TGTACCGCCGGAAGCACCAGGAGCTGCAAGCCATGCAGATGGAGCTGCAGAGCCCTGA | |
| | GTACAAGCTGAGCAAGCTCCGCACCTCGACCATCATGACCGACTACAACCCCAACTAC | |
| | TGCTTTGCTGGCAAGACCTCCTCCATCAGTGACCTGAAGGAGGTGCCGCGGAAAAACA | |
| | TCACCCTCATTCGGGGTCTGGGCCATGGCGCCTTTGGGGAGGTGTATGAAGGCCAGGT | |
| | GTCCGGAATGCCCAACGACCCAAGCCCCCTGCAAGTGGCTGTGAAGACGCTGCCTGAA | |
| | GTGTGCTCTGAACAGGACGAACTGGATTTCCTCATGGAAGCCCTGATCATCAGCAAAT | |
| | TCAACCACCAGAACATTGTTCGCTGCATTGGGGTGAGCCTGCAATCCCTGCCCCGGTT | |
| | CATCCTGCTGGAGCTCATGGCGGGGGGAGACCTCAAGTCCTTCCTCCGAGAGACCCGC | |
| | CCTCGCCCGAGCCAGCCCTCCTCCCTGGCCATGCTGGACCTTCTGCACGTGGCTCGGG | |
| | ACATTGCCTGTGGCTGTCAGTATTTGGAGGAAAACCACTTCATCCACCGAGACATTGC | |
| | TGCCAGAAACTGCCTCTTGACCTGTCCAGGCCCTGGAAGAGTGGCCAAGATTGGAGAC | |
| | TTCGGGATGGCCCGAGACATCTACAGGGCGAGCTACTATAGAAAGGGAGGCTGTGCCA | |
| | TGCTGCCAGTTAAGTGGATGCCCCCAGAGGCCTTCATGGAAGGAATATTCACTTCTAA | |
| | AACAGACACATGGTCCTTTGGAGTGCTGCTATGGGAAATCTTTTCTCTTGGATATATG | |
| | CCATACCCCAGCAAAAGCAACCAGGAAGTTCTGGAGTTTGTCACCAGTGGAGGCCGGA | |
| | TGGACCCACCCAAGAACTGCCCTGGGCCTGTATACCGGATAATGACTCAGTGCTGGCA | |
| | ACATCAGCCTGAAGACAGGCCCAACTTTGCCATCATTTTGGAGAGGATTGAATACTGC | |
| | ACCCAGGACCCGGATGTAATCAACACCGCTTTGCCGATAGAATATGGTCCACTTGTGG | |
| | AAGAGGAAGAGAAAGTGCCTGTGAGGCCCAAGGACCCTGAGGGGGTTCCTCCTCTCCT | |
| | GGTCTCTCAACAGGCAAAACGGGAGGAGGAGCGCAGCCCAGCTGCCCCACCACCTCTG | |
| | CCTACCACCTCCTCTGGCAAGGCTGCAAAGAAACCCACAGCTGCAGAGATCTCTGTTC | |
| | GAGTCCCTAGAGGGCCGGCCGTGGAAGGGGGACACGTGAATATGGCATTCTCTCAGTC | |
| | CAACCCTCCTTCGGAGTTGCACAAGGTCCACGGATCCAGAAACAAGCCCACCAGCTTG | |
| | TGGAACCCAACGTACGGCTCCTGGTTTACAGAGAAACCCACCAAAAAGAATAATCCTA | |
| | TAGCAAAGAAGGAGCCACACGACAGGGGTAACCTGGGGCTGGAGGGAAGCTGTACTGT | |
| | CCCACCTAACGTTGCAACTGGGAGACTTCCGGGGGCCTCACTGCTCCTAGAGCCCTCT | |
| | TCGCTGACTGCCAATATGAAGGAGGTACCTCTGTTCAGGCTACGTCACTTCCCTTGTG | |
| | GGAATGTCAATTACGGCTACCAGCAACAGGGCTTGCCCTTAGAAGCCGCTACTGCCCC | |
| | TGGAGCTGGTCATTACGAGGATACCATTCTGAAAAGCAAGAATAGCATGAACCAGCCT | |
| | GGGCCCTGA | |
| ALK- | ATGGCGGTGGCCGAGCTGTACACGCAGTACAACAGGGTCTGGATTCCCGATCCTGAAG | 4 |
| MYO5C | AAGTTTGGAAGTCTGCTGAAATAGCCAAGGACTACAGAGTTGGTGACAAGGTCCTGCG | |
| | ACTCCTGCTGGAGGATGGAACGGAGCTGGATTATTCTGTCAATCCAGAATCTCTGCCT | |
| | CCACTTCGGAATCCTGACATCCTCGTGGGCGAGAATGACCTCACGGCTCTCAGCTATC | |
| | TTCACGAGCCCGCGGTGCTCCACAACCTCAGAATCCGCTTTGCAGAATCCAAACTCAT | |
| | TTACACCTACAGTGGAATCATTTTGGTGGCCATGAATCCTTACAAGCAGTTGCCAATA | |
| | TACGGAGATGCCATCATCCACGCCTACAGCGGGCAGAACATGGGCGATATGGACCCAC | |
| | ACATATTTGCCGTGGCAGAAGAGGCATACAAGCAGATGGCCAGAAACAACAGAAACCA | |
| | GTCCATAATTGTAAGTGGGGAGTCAGGTGCTGGAAAGACAGTGTCGGCTCGCTATGCC | |
| | ATGAGGTACTTTGCCACCGTCAGCAAATCGGGCAGCAACGCTCACGTGGAAGACAAGG | |
| | TCCTGGCATCCAATCCCATCACCGAGGCCGTTGGAAATGCCAAGACCACCCGCAATGA | |
| | CAATAGTAGTCGGTTTGGGAAATACACAGAAATCAGTTTTGATGAACAAAATCAAATT | |
| | ATAGGAGCCAACATGAGCACTTACCTCCTGGAGAAATCCAGAGTTGTCTTTCAATCGG | |
| | AAAATGAACGAAATTACCACATTTTCTATCAGCTTTGTGCATCTGCACAGCAGTCGGA | |
| | ATTTAAACATCTTAAATTGGGGAGTGCCGAAGAATTTAATTATACAAGAATGGGAGGC | |
| | AATACTGTCATTGAGGGTGTGAATGATCGAGCTGAAATGGTAGAGACTCAAAAGACCT | |
| | TCACGCTTCTGGGTTTCAAGGAGGATTTTCAGATGGACGTTTTTAAAATCCTGGCAGC | |
| | CATCCTACATCTGGGCAATGTGCAGATCACCGCGGTGGGCAACGAGAGGTCCTCAGTT | |
| | AGTGAGGATGACAGTCACCTGAAGGTGTTCTGTGAGCTCCTGGGCCTGGAGAGTGGCA | |
| | GAGTTGCTCAGTGGCTGTGCAATCGCAAAATCGTCACAAGCTCTGAGACGGTGGTAAA | |
| | ACCCATGACCAGGCCTCAGGCTGTCAACGCCAGGGATGCACTGGCCAAAAAGATCTAT | |
| | GCTCACCTGTTCGACTTCATTGTGGAGAGAATTAACCAAGCGTTGCAGTTTTCAGGCA | |
| | AGCAGCACACTTTTATTGGTGTTTTGGACATTTATGGTTTTGAAACCTTTGATGTGAA | |
| | CAGCTTTGAACAATTTTGCATCAATTACGCTAATGAAAAACTGCAACAACAGTTTAAC | |
| | ATGCATGTCTTCAAACTGGAACAAGAAGAATACATGAAGGAAGATATACCTTGGACGC | |
| | TGATAGATTTTTATGACAATCAACCAGTTATTGACCTGATTGAAGCAAAAATGGGAAT | |
| | TCTGGAGTTACTGGATGAAGAATGTTTGTTACCACATGGAACTGATGAAAACTGGCTT | |
| | CAAAAGCTGTATAATAATTTTGTCAACAGGAACCCTTTGTTTGAAAAGCCTAGAATGT | |
| | CAAACACATCCTTTGTCATCCAGCACTTTGCTGATAAGGTAGAGTATAAATGTGAAGG | |
| | TTTCCTGGAGAAAAACAGAGACACCGTCTATGACATGCTGGTTGAAATCCTGAGAGCA | |
| | AGCAAGTTTCATCTCTGTGCCAACTTTTTTCAAGAAAATCCAACTCCTCCTTCTCCTT | |
| | TTGGTTCAATGATTACAGTTAAATCTGCAAAGCAAGTCATCAAGCCAAACAGCAAGCA | |
| | TTTCCGGACCACAGTTGGGAGCAAGTTCCGCAGCTCTCTGTACTTGCTCATGGAGACC | |
| | CTCAATGCGACGACGCCCCACTACGTTCGATGCATCAAGCCAAATGATGAGAAGTTAC | |
| | CCTTTGAATTTGACTCCAAAAGAATTGTTCAGCAGCTGCGAGCCTGCGGCGTTTTAGA | |
| | AACGATTCGCATTAGTGCACAGAGCTACCCTTCCAGGTGGACATACATCGAGTTCTAC | |
| | AGTCGCTACGGCATTCTCATGACCAAGCAAGAGCTTTCCTTCAGCGATAAAAAGGAGG | |
| | TGTGCAAGGTGGTTTTACACAGACTCATCCAGGATTCTAATCAGTACCAGTTTGGTAA | |
| | AACCAAAATTTTCTTCAGAGCAGGACAAGTGGCTTATTTAGAGAAACTTCGATTGGAT | |
| | AAACTGAGGCAGAGTTGTGTTATGGTACAAAAGCACATGCGTGGCTGGCTCCAGAGGA | |
| | AAAAATTCCTCCGAGAGAGACGAGCCGCCCTGATAATCCAGCAGTACTTCCGGGGTCA | |
| | GCAAACTGTGAGGAAAGCTATTACTGCAGTGGCCTTAAAAGAAGCTTGGGCAGCCATA | |
| | ATCATTCAGAAGCACTGCCGCGGGTATCTTGTTCGCAGCCTGTATCAGTTGATTCGCA | |
| | TGGCCACCATCACAATGCAGGCCTACAGCCGAGGATTCCTGGCAAGGAGGAGGTATCG | |
| | AAAGATGCTGGAGGAACATAAGGCTGTGATCCTACAGAAATACGCACGGGCGTGGCTG | |
| | GCCAGACGCAGATTCCAGAGTATCCGACGATTCGTGCTTAATATTCAGCTTACTTACA | |
| | GGGTCCAGCGTTTGCAGAAAAAGTTGGAAGATCAGAACAAAGAAAACCATGGGCTGGT | |
| | GGAGAAGCTGACTAGCCTGGCTGCTCTTCGAGCTGGGGATGTGGAAAAGATTCAGAAG | |
| | CTGGAAGCAGAACTAGAAAAAGCAGCCACTCACAGGCGAAATTACGAGGAGAAGGGGA | |
| | AGAGATACAGGGATGCTGTGGAAGAGAAATTGGCAAAGCTTCAGAAGCATAATTCAGA | |
| | ACTGGAAACACAGAAAGAACAAATACAGCTGAAGCTTCAAGAGAAGACTGAAGAGTTA | |
| | AAAGAAAAAATGGACAACCTCACCAAGCAGCTCTTTGATGATGTACAAAAGGAAGAAC | |
| | GGCAAAGAATGCTTCTTGAAAAAAGTTTTGAACTGAAAACACAAGACTATGAGAAGCA | |
| | GATTCAGTCTTTGAAAGAAGAAATTAAAGCTCTCAAGGATGAGAAGATGCAACTCCAA | |
| | CACCTGGTGGAGGGGGAGCACGTCACTTCTGATGGCTTGAAGGCGGAAGTGGCCCGCC | |
| | TGAGCAAGCAGGTCAAGACAATCTCTGAGTTCGAAAAAGAGATAGAACTACTTCAGGC | |
| | ACAGAAGATAGATGTGGAGAAACATGTGCAGTCACAAAAACGGGAAATGAGAGAAAAG | |
| | ATGTCAGAGATCACCAAACAACTTCTCGAAAGCTATGACATTGAAGATGTAAGAAGCA | |
| | GGCTCTCTGTGGAAGATCTGGAACATTTAAATGAGGATGGAGAACTTTGGTTTGCTTA | |
| | TGAAGGACTAAAGAAAGCAACACGTGTTTTGGAGAGCCATTTCCAGTCTCAGAAGGAT | |
| | TGCTATGAAAAGGAGATTGAAGCTTTGAACTTCAAAGTGGTGCATCTCAGTCAAGAAA | |
| | TCAACCACCTGCAGAAGTTATTCAGAGAAGAAAATGACATCAATGAAAGCATCCGTCA | |
| | TGAAGTTACCAGGCTAACATCAGAGAACATGATGATCCCAGACTTTAAACAGCAAATT | |
| | TCAGAATTGGAGAAACAGAAGCAAGATCTTGAAATCCGCCTGAATGAACAAGCTGAGA | |
| | AAATGAAAGTGTACCGCCGGAAGCACCAGGAGCTGCAAGCCATGCAGATGGAGCTGCA | |
| | GAGCCCTGAGTACAAGCTGAGCAAGCTCCGCACCTCGACCATCATGACCGACTACAAC | |
| | CCCAACTACTGCTTTGCTGGCAAGACCTCCTCCATCAGTGACCTGAAGGAGGTGCCGC | |
| | GGAAAAACATCACCCTCATTCGGGGTCTGGGCCATGGCGCCTTTGGGGAGGTGTATGA | |
| | AGGCCAGGTGTCCGGAATGCCCAACGACCCAAGCCCCCTGCAAGTGGCTGTGAAGACG | |
| | CTGCCTGAAGTGTGCTCTGAACAGGACGAACTGGATTTCCTCATGGAAGCCCTGATCA | |
| | TCAGCAAATTCAACCACCAGAACATTGTTCGCTGCATTGGGGTGAGCCTGCAATCCCT | |
| | GCCCCGGTTCATCCTGCTGGAGCTCATGGCGGGGGGAGACCTCAAGTCCTTCCTCCGA | |
| | GAGACCCGCCCTCGCCCGAGCCAGCCCTCCTCCCTGGCCATGCTGGACCTTCTGCACG | |
| | TGGCTCGGGACATTGCCTGTGGCTGTCAGTATTTGGAGGAAAACCACTTCATCCACCG | |
| | AGACATTGCTGCCAGAAACTGCCTCTTGACCTGTCCAGGCCCTGGAAGAGTGGCCAAG | |
| | ATTGGAGACTTCGGGATGGCCCGAGACATCTACAGGGCGAGCTACTATAGAAAGGGAG | |
| | GCTGTGCCATGCTGCCAGTTAAGTGGATGCCCCCAGAGGCCTTCATGGAAGGAATATT | |
| | CACTTCTAAAACAGACACATGGTCCTTTGGAGTGCTGCTATGGGAAATCTTTTCTCTT | |
| | GGATATATGCCATACCCCAGCAAAAGCAACCAGGAAGTTCTGGAGTTTGTCACCAGTG | |
| | GAGGCCGGATGGACCCACCCAAGAACTGCCCTGGGCCTGTATACCGGATAATGACTCA | |
| | GTGCTGGCAACATCAGCCTGAAGACAGGCCCAACTTTGCCATCATTTTGGAGAGGATT | |
| | GAATACTGCACCCAGGACCCGGATGTAATCAACACCGCTTTGCCGATAGAATATGGTC | |
| | CACTTGTGGAAGAGGAAGAGAAAGTGCCTGTGAGGCCCAAGGACCCTGAGGGGGTTCC | |
| | TCCTCTCCTGGTCTCTCAACAGGCAAAACGGGAGGAGGAGCGCAGCCCAGCTGCCCCA | |
| | CCACCTCTGCCTACCACCTCCTCTGGCAAGGCTGCAAAGAAACCCACAGCTGCAGAGA | |
| | TCTCTGTTCGAGTCCCTAGAGGGCCGGCCGTGGAAGGGGGACACGTGAATATGGCATT | |
| | CTCTCAGTCCAACCCTCCTTCGGAGTTGCACAAGGTCCACGGATCCAGAAACAAGCCC | |
| | ACCAGCTTGTGGAACCCAACGTACGGCTCCTGGTTTACAGAGAAACCCACCAAAAAGA | |
| | ATAATCCTATAGCAAAGAAGGAGCCACACGACAGGGGTAACCTGGGGCTGGAGGGAAG | |
| | CTGTACTGTCCCACCTAACGTTGCAACTGGGAGACTTCCGGGGGCCTCACTGCTCCTA | |
| | GAGCCCTCTTCGCTGACTGCCAATATGAAGGAGGTACCTCTGTTCAGGCTACGTCACT | |
| | TCCCTTGTGGGAATGTCAATTACGGCTACCAGCAACAGGGCTTGCCCTTAGAAGCCGC | |
| | TACTGCCCCTGGAGCTGGTCATTACGAGGATACCATTCTGAAAAGCAAGAATAGCATG | |
| | AACCAGCCTGGGCCCTGA | |
| ALK- | ATGGAGGTGGCGGTGGAGAAGGCGGTGGCGGCGGCGGCAGCGGCCTCGGCTGCGGCCT | 5 |
| TRIM24 | CCGGGGGGCCCTCGGCGGCGCCGAGCGGGGAGAACGAGGCCGAGAGTCGGCAGGGCCC | |
| | GGACTCGGAGCGCGGCGGCGAGGCGGCCCGGCTCAACCTGTTGGACACTTGCGCCGTG | |
| | TGCCACCAGAACATCCAGAGCCGGGCGCCCAAGCTGCTGCCCTGCCTGCACTCTTTCT | |
| | GCCAGCGCTGCCTGCCCGCGCCCCAGCGCTACCTCATGCTGCCCGCGCCCATGCTGGG | |
| | CTCGGCCGAGACCCCGCCACCCGTCCCTGCCCCCGGCTCGCCGGTCAGCGGCTCGTCG | |
| | CCGTTCGCCACCCAAGTTGGAGTCATTCGTTGCCCAGTTTGCAGCCAAGAATGTGCAG | |
| | AGAGACACATCATAGATAACTTTTTTGTGAAGGACACTACTGAGGTTCCCAGCAGTAC | |
| | AGTAGAAAAGTCAAATCAGGTATGTACAAGCTGTGAGGACAACGCAGAAGCCAATGGG | |
| | TTTTGTGTAGAGTGTGTTGAATGGCTCTGCAAGACGTGTATCAGAGCTCATCAGAGGG | |
| | TAAAGTTCACAAAAGACCACACTGTCAGACAGAAAGAGGAAGTATCTCCAGAGGCAGT | |
| | TGGTGTCACCAGCCAGCGACCAGTGTTTTGTCCTTTTCATAAAAAGGAGCAGCTGAAG | |
| | CTGTACTGTGAGACATGTGACAAACTGACATGTCGAGACTGTCAGTIGTTAGAACATA | |
| | AAGAGCATAGATACCAATTTATAGAAGAAGCTTTTCAGAATCAGAAAGTGATCATAGA | |
| | TACACTAATCACCAAACTGATGGAAAAAACAAAATACATAAAATTCACAGGAAATCAG | |
| | ATCCAAAACAGAATTATTGAAGTAAATCAAAATCAAAAGCAGGTGGAACAGGATATTA | |
| | AAGTTGCTATATTTACACTGATGGTAGAAATAAATAAAAAAGGAAAAGCTCTACTGCA | |
| | TCAGTTAGAGAGCCTTGCAAAGGACCATCGCATGAAACTTATGCAACAACAACAGGAA | |
| | GTGGCTGGACTCTCTAAACAATTGGAGCATGTCATGCATTTTTCTAAATGGGCAGTTT | |
| | CCAGTGGCAGCAGTACAGCATTACTTTATAGCAAACGACTGATTACATACCGGTTACG | |
| | GCACCTCCTTCGTGCAAGGTGTGATGCATCCCCAGTGACCAACAACACCATCCAATTT | |
| | CACTGTGATCCTAGTTTCTGGGCTCAAAATATCATCAACTTAGGTTCTTTAGTAATCG | |
| | AGGATAAAGAGAGCCAGCCACAAATGCCTAAGCAGAATCCTGTCGTGGAACAGAATTC | |
| | ACAGCCACCAAGTGGTTTATCATCAAACCAGTTATCCAAGTTCCCAACACAGATCAGC | |
| | CTAGCTCAATTACGGCTCCAGCATATGCAGCAACAGCAACCGCCTCCACGTTTGATAA | |
| | ACTTTCAGAATCACAGCCCCAAACCCAATGGACCAGTTCTTCCTCCTCATCCTCAACA | |
| | ACTGAGATATCCACCAAACCAGAACATACCACGACAAGCAATAAAGCCAAACCCCCTA | |
| | CAGATGGCTTTCTTGGCTCAACAAGCCATAAAACAGTGGCAGATCAGCAGTGGACAGG | |
| | GAACCCCATCAACTACCAACAGCACATCCTCTACTCCTTCCAGCCCCACGATTACTAG | |
| | TGCAGCAGGATATGATGGAAAGGCTTTTGGTTCACCTATGATCGATTTGAGCTCACCA | |
| | GTGGGAGGGTCTTATAATCTTCCCTCTCTTCCGGATATTGACTGTTCAAGTACTATTA | |
| | TGCTGGACAATATTGTGAGGAAAGATACTAATATAGATCATGGCCAGCCAAGACCACC | |
| | CTCAAACAGAACGGTCCAGTCACCAAATTCATCAGTGCCATCTCCAGGCCTTGCAGTG | |
| | TACCGCCGGAAGCACCAGGAGCTGCAAGCCATGCAGATGGAGCTGCAGAGCCCTGAGT | |
| | ACAAGCTGAGCAAGCTCCGCACCTCGACCATCATGACCGACTACAACCCCAACTACTG | |
| | CTTTGCTGGCAAGACCTCCTCCATCAGTGACCTGAAGGAGGTGCCGCGGAAAAACATC | |
| | ACCCTCATTCGGGGTCTGGGCCATGGCGCCTTTGGGGAGGTGTATGAAGGCCAGGTGT | |
| | CCGGAATGCCCAACGACCCAAGCCCCCTGCAAGTGGCTGTGAAGACGCTGCCTGAAGT | |
| | GTGCTCTGAACAGGACGAACTGGATTTCCTCATGGAAGCCCTGATCATCAGCAAATTC | |
| | AACCACCAGAACATTGTTCGCTGCATTGGGGTGAGCCTGCAATCCCTGCCCCGGTTCA | |
| | TCCTGCTGGAGCTCATGGCGGGGGGAGACCTCAAGTCCTTCCTCCGAGAGACCCGCCC | |
| | TCGCCCGAGCCAGCCCTCCTCCCTGGCCATGCTGGACCTTCTGCACGTGGCTCGGGAC | |
| | ATTGCCTGTGGCTGTCAGTATTTGGAGGAAAACCACTTCATCCACCGAGACATTGCTG | |
| | CCAGAAACTGCCTCTTGACCTGTCCAGGCCCTGGAAGAGTGGCCAAGATTGGAGACTT | |
| | CGGGATGGCCCGAGACATCTACAGGGCGAGCTACTATAGAAAGGGAGGCTGTGCCATG | |
| | CTGCCAGTTAAGTGGATGCCCCCAGAGGCCTTCATGGAAGGAATATTCACTTCTAAAA | |
| | CAGACACATGGTCCTTTGGAGTGCTGCTATGGGAAATCTTTTCTCTTGGATATATGCC | |
| | ATACCCCAGCAAAAGCAACCAGGAAGTTCTGGAGTTTGTCACCAGTGGAGGCCGGATG | |
| | GACCCACCCAAGAACTGCCCTGGGCCTGTATACCGGATAATGACTCAGTGCTGGCAAC | |
| | ATCAGCCTGAAGACAGGCCCAACTTTGCCATCATTTTGGAGAGGATTGAATACTGCAC | |
| | CCAGGACCCGGATGTAATCAACACCGCTTTGCCGATAGAATATGGTCCACTTGTGGAA | |
| | GAGGAAGAGAAAGTGCCTGTGAGGCCCAAGGACCCTGAGGGGGTTCCTCCTCTCCTGG | |
| | TCTCTCAACAGGCAAAACGGGAGGAGGAGCGCAGCCCAGCTGCCCCACCACCTCTGCC | |
| | TACCACCTCCTCTGGCAAGGCTGCAAAGAAACCCACAGCTGCAGAGATCTCTGTTCGA | |
| | GTCCCTAGAGGGCCGGCCGTGGAAGGGGGACACGTGAATATGGCATTCTCTCAGTCCA | |
| | ACCCTCCTTCGGAGTTGCACAAGGTCCACGGATCCAGAAACAAGCCCACCAGCTTGTG | |
| | GAACCCAACGTACGGCTCCTGGTTTACAGAGAAACCCACCAAAAAGAATAATCCTATA | |
| | GCAAAGAAGGAGCCACACGACAGGGGTAACCTGGGGCTGGAGGGAAGCTGTACTGTCC | |
| | CACCTAACGTTGCAACTGGGAGACTTCCGGGGGCCTCACTGCTCCTAGAGCCCTCTTC | |
| | GCTGACTGCCAATATGAAGGAGGTACCTCTGTTCAGGCTACGTCACTTCCCTTGTGGG | |
| | AATGTCAATTACGGCTACCAGCAACAGGGCTTGCCCTTAGAAGCCGCTACTGCCCCTG | |
| | GAGCTGGTCATTACGAGGATACCATTCTGAAAAGCAAGAATAGCATGAACCAGCCTGG | |
| | GCCCTGA | |
| ALK- | ATGCAGGCCGCCGCCCTCCCTGAGGAGATCCGTTGGCTCCTGGAAGATGCTGAAGAGT | 6 |
| SKAP1 | TTCTGGCAGAAGGTTTGCGGAATGAGAACCTCAGCGCTGTTGCAAGGGATCACAGAGA | |
| | CCATATTCTACGGGGCTTTCAGCAAATCAAAGCCAGGTACTATTGGGATTTTCAGCCC | |
| | CAAGTGTACCGCCGGAAGCACCAGGAGCTGCAAGCCATGCAGATGGAGCTGCAGAGCC | |
| | CTGAGTACAAGCTGAGCAAGCTCCGCACCTCGACCATCATGACCGACTACAACCCCAA | |
| | CTACTGCTTTGCTGGCAAGACCTCCTCCATCAGTGACCTGAAGGAGGTGCCGCGGAAA | |
| | AACATCACCCTCATTCGGGGTCTGGGCCATGGCGCCTTTGGGGAGGTGTATGAAGGCC | |
| | AGGTGTCCGGAATGCCCAACGACCCAAGCCCCCTGCAAGTGGCTGTGAAGACGCTGCC | |
| | TGAAGTGTGCTCTGAACAGGACGAACTGGATTTCCTCATGGAAGCCCTGATCATCAGC | |
| | AAATTCAACCACCAGAACATTGTTCGCTGCATTGGGGTGAGCCTGCAATCCCTGCCCC | |
| | GGTTCATCCTGCTGGAGCTCATGGCGGGGGGAGACCTCAAGTCCTTCCTCCGAGAGAC | |
| | CCGCCCTCGCCCGAGCCAGCCCTCCTCCCTGGCCATGCTGGACCTTCTGCACGTGGCT | |
| | CGGGACATTGCCTGTGGCTGTCAGTATTTGGAGGAAAACCACTTCATCCACCGAGACA | |
| | TTGCTGCCAGAAACTGCCTCTTGACCTGTCCAGGCCCTGGAAGAGTGGCCAAGATTGG | |
| | AGACTTCGGGATGGCCCGAGACATCTACAGGGCGAGCTACTATAGAAAGGGAGGCTGT | |
| | GCCATGCTGCCAGTTAAGTGGATGCCCCCAGAGGCCTTCATGGAAGGAATATTCACTT | |
| | CTAAAACAGACACATGGTCCTTTGGAGTGCTGCTATGGGAAATCTTTTCTCTTGGATA | |
| | TATGCCATACCCCAGCAAAAGCAACCAGGAAGTTCTGGAGTTTGTCACCAGTGGAGGC | |
| | CGGATGGACCCACCCAAGAACTGCCCTGGGCCTGTATACCGGATAATGACTCAGTGCT | |
| | GGCAACATCAGCCTGAAGACAGGCCCAACTTTGCCATCATTTTGGAGAGGATTGAATA | |
| | CTGCACCCAGGACCCGGATGTAATCAACACCGCTTTGCCGATAGAATATGGTCCACTT | |
| | GTGGAAGAGGAAGAGAAAGTGCCTGTGAGGCCCAAGGACCCTGAGGGGGTTCCTCCTC | |
| | TCCTGGTCTCTCAACAGGCAAAACGGGAGGAGGAGCGCAGCCCAGCTGCCCCACCACC | |
| | TCTGCCTACCACCTCCTCTGGCAAGGCTGCAAAGAAACCCACAGCTGCAGAGATCTCT | |
| | GTTCGAGTCCCTAGAGGGCCGGCCGTGGAAGGGGGACACGTGAATATGGCATTCTCTC | |
| | AGTCCAACCCTCCTTCGGAGTTGCACAAGGTCCACGGATCCAGAAACAAGCCCACCAG | |
| | CTTGTGGAACCCAACGTACGGCTCCTGGTTTACAGAGAAACCCACCAAAAAGAATAAT | |
| | CCTATAGCAAAGAAGGAGCCACACGACAGGGGTAACCTGGGGCTGGAGGGAAGCTGTA | |
| | CTGTCCCACCTAACGTTGCAACTGGGAGACTTCCGGGGGCCTCACTGCTCCTAGAGCC | |
| | CTCTTCGCTGACTGCCAATATGAAGGAGGTACCTCTGTTCAGGCTACGTCACTTCCCT | |
| | TGTGGGAATGTCAATTACGGCTACCAGCAACAGGGCTTGCCCTTAGAAGCCGCTACTG | |
| | CCCCTGGAGCTGGTCATTACGAGGATACCATTCTGAAAAGCAAGAATAGCATGAACCA | |
| | GCCTGGGCCCTGA | |
| ALK- | ATGTTCACCCTGTCTCAGACCTCGAGAGCATGGTTCATCGATAGAGCCCGTCAGGCAC | 7 |
| UBE3B | GAGAAGAAAGGCTTGTGCAGAAGGAACGGGAGCGGGCAGCTGTTGTGATCCAGGCCCA | |
| | TGTCCGGAGTTTTCTCTGTCGGAGTCGACTGCAGAGAGATATCAGGAGAGAGATTGAT | |
| | GACTTTTTTAAAGCAGATGACCCTGAGTCCACTAAAAGAAGTGCACTTTGTATTTTCA | |
| | AGATTGCCAGGAAACTGCTGTTCCTATTCAGAATCAAAGAGGATAATGAGAGATTTGA | |
| | GAAGTTGTGTCGCAGCATCCTGAGCAGCATGGATGCTGAGAATGAGCCTAAGGTGTGG | |
| | TATGTGTCCCTGGCTTGTTCTAAGGACCTCACCCTCCTTTGGATTCAACAGATCAAGA | |
| | ACATTTTGTGGTACTGCTGTGATTTTCTCAAGCAGCTCAAGCCTGAAATCCTGCAGGA | |
| | CTCCCGACTCATCACCCTGTACCTCACGATGCTTGTCACCTTCACAGACACTTCAACG | |
| | TGGAAAATTCTTCGGGGAAAAGGTGAAAGTCTTCGACCAGCGATGAACCACATTTGTG | |
| | CAAATATAATGGGACATCTCAACCAGCATGGATTTTATTCTGTGCTGCAGATATTGTT | |
| | AACCCGTGGCCTGGCAAGACCCCGTCCTTGTCTATCCAAAGGCACTTTAACAGCAGCT | |
| | TTTTCTCTAGCGTTACGCCCTGTGATTGCTGCACAGTTCTCAGACAATCTGATTCGGC | |
| | CGTTCCTCATCCACATCATGTCTGTGCCTGCTCTGGTGACTCATCTCAGCACAGTGAC | |
| | CCCTGAGCGCCTCACTGTTTTAGAATCCCATGACATGCTTCGTAAATTCATCATATTT | |
| | TTAAGAGACCAAGATCGATGCCGTGATGTATGTGAAAGTTTAGAAGGATGCCATACGC | |
| | TTTGTCTAATGGTGTACCGCCGGAAGCACCAGGAGCTGCAAGCCATGCAGATGGAGCT | |
| | GCAGAGCCCTGAGTACAAGCTGAGCAAGCTCCGCACCTCGACCATCATGACCGACTAC | |
| | AACCCCAACTACTGCTTTGCTGGCAAGACCTCCTCCATCAGTGACCTGAAGGAGGTGC | |
| | CGCGGAAAAACATCACCCTCATTCGGGGTCTGGGCCATGGCGCCTTTGGGGAGGTGTA | |
| | TGAAGGCCAGGTGTCCGGAATGCCCAACGACCCAAGCCCCCTGCAAGTGGCTGTGAAG | |
| | ACGCTGCCTGAAGTGTGCTCTGAACAGGACGAACTGGATTTCCTCATGGAAGCCCTGA | |
| | TCATCAGCAAATTCAACCACCAGAACATTGTTCGCTGCATTGGGGTGAGCCTGCAATC | |
| | CCTGCCCCGGTTCATCCTGCTGGAGCTCATGGCGGGGGGAGACCTCAAGTCCTTCCTC | |
| | CGAGAGACCCGCCCTCGCCCGAGCCAGCCCTCCTCCCTGGCCATGCTGGACCTTCTGC | |
| | ACGTGGCTCGGGACATTGCCTGTGGCTGTCAGTATTTGGAGGAAAACCACTTCATCCA | |
| | CCGAGACATTGCTGCCAGAAACTGCCTCTTGACCTGTCCAGGCCCTGGAAGAGTGGCC | |
| | AAGATTGGAGACTTCGGGATGGCCCGAGACATCTACAGGGCGAGCTACTATAGAAAGG | |
| | GAGGCTGTGCCATGCTGCCAGTTAAGTGGATGCCCCCAGAGGCCTTCATGGAAGGAAT | |
| | ATTCACTTCTAAAACAGACACATGGTCCTTTGGAGTGCTGCTATGGGAAATCTTTTCT | |
| | CTTGGATATATGCCATACCCCAGCAAAAGCAACCAGGAAGTTCTGGAGTTTGTCACCA | |
| | GTGGAGGCCGGATGGACCCACCCAAGAACTGCCCTGGGCCTGTATACCGGATAATGAC | |
| | TCAGTGCTGGCAACATCAGCCTGAAGACAGGCCCAACTTTGCCATCATTTTGGAGAGG | |
| | ATTGAATACTGCACCCAGGACCCGGATGTAATCAACACCGCTTTGCCGATAGAATATG | |
| | GTCCACTTGTGGAAGAGGAAGAGAAAGTGCCTGTGAGGCCCAAGGACCCTGAGGGGGT | |
| | TCCTCCTCTCCTGGTCTCTCAACAGGCAAAACGGGAGGAGGAGCGCAGCCCAGCTGCC | |
| | CCACCACCTCTGCCTACCACCTCCTCTGGCAAGGCTGCAAAGAAACCCACAGCTGCAG | |
| | AGATCTCTGTTCGAGTCCCTAGAGGGCCGGCCGTGGAAGGGGGACACGTGAATATGGC | |
| | ATTCTCTCAGTCCAACCCTCCTTCGGAGTTGCACAAGGTCCACGGATCCAGAAACAAG | |
| | CCCACCAGCTTGTGGAACCCAACGTACGGCTCCTGGTTTACAGAGAAACCCACCAAAA | |
| | AGAATAATCCTATAGCAAAGAAGGAGCCACACGACAGGGGTAACCTGGGGCTGGAGGG | |
| | AAGCTGTACTGTCCCACCTAACGTTGCAACTGGGAGACTTCCGGGGGCCTCACTGCTC | |
| | CTAGAGCCCTCTTCGCTGACTGCCAATATGAAGGAGGTACCTCTGTTCAGGCTACGTC | |
| | ACTTCCCTTGTGGGAATGTCAATTACGGCTACCAGCAACAGGGCTTGCCCTTAGAAGC | |
| | CGCTACTGCCCCTGGAGCTGGTCATTACGAGGATACCATTCTGAAAAGCAAGAATAGC | |
| | ATGAACCAGCCTGGGCCCTGA | |
| ALK-TNS3 | ATGGAGGAGGGCCATGGGCTGGACCTCACTTACATCACGGAGCGCATCATCGCTGTGT | 8 |
| | CCTTCCCTGCCGGCTGCTCTGAGGAGTCCTACCTGCACAACCTACAGGAGGTCACGCG | |
| | CATGCTCAAGTCCAAGCACGGGGACAACTACCTGGTATTAAACCTTTCAGAAAAGAGA | |
| | TATGACCTTACGAAGCTTAACCCAAAGATCATGGATGTGGGCTGGCCAGAGCTCCACG | |
| | CACCGCCCCTGGATAAGATGTGTACCATATGCAAGGCGCAGGAGTCCTGGCTGAACAG | |
| | CAACCTCCAGCATGTGGTCGTCATTCACTGCAGGGGCGGGAAAGGACGCATAGGAGTG | |
| | GTCATATCATCCTACATGCATTTCACCAACGTCTCAGCCAGCGCCGACCAGGCCCTTG | |
| | ACAGGTTTGCAATGAAGAAGTTTTATGATGACAAAGTTTCAGCTTTAATGCAGCCTTC | |
| | CCAAAAACGGTATGTTCAGTTCCTCAGTGGGCTCCTGTCCGGATCGGTGAAAATGAAT | |
| | GCCTCTCCCCTGTTCCTGCATTTTGTCATCCTCCACGGCACCCCCAACTTCGACACAG | |
| | GTGGAGTGTGCCGGCCCTTTCTGAAGCTCTACCAAGCCATGCAGCCTGTGTACACCTC | |
| | CGGGATCTACAACGTTGGCCCAGAAAACCCCAGCAGGATCTGCATCGTCATCGAGCCG | |
| | GCCCAGCTTCTGAAGGGAGATGTCATGGTGAAATGCTACCACAAGAAATACCGCTCGG | |
| | CCACCCGTGACGTCATTTTCCGCCTGCAGTTTCACACTGGGGCTGTGCAGGGCTACGG | |
| | GCTGGTGTTTGGGAAGGAGGATCTGGACAATGCCAGCAAAGATGACCGTTTTCCTGAC | |
| | TATGGGAAGGTTGAATTAGTCTTCTCTGCCACGCCTGAGAAGATTCAAGGGTCCGAAC | |
| | ACTTGTACAACGACCACGGTGTGATTGTGGACTACAACACAACAGACCCACTGATACG | |
| | CTGGGACTCGTACGAGAACCTCAGTGCAGATGGAGAAGTGCTACACACGCAGGGCCCT | |
| | GTCGATGGCAGCCTTTACGCGAAGGTGAGGAAGAAAAGCTCCTCGGATCCTGGCATCC | |
| | CAGGTGGCCCCCAGGCAATCCCGGCCACCAACAGCCCAGACCACAGTGACCACACCTT | |
| | GTCTGTCAGCAGTGACTCCGGCCACTCTACAGCCTCTGCCAGGACGGATAAGACGGAA | |
| | GAGCGCCTGGCCCCAGGAACCAGGAGGGGCCTGAGTGCCCAGGAGAAGGCAGAGTTGG | |
| | ACCAGCTGCTCAGTGGCTTTGGCCTGGAAGATCCTGGAAGCTCCCTCAAGGAAATGAC | |
| | TGATGCTCGAAGCAAGTACAGTGGGACCCGCCACGTGGTGCCAGCCCAGGTTCACGTG | |
| | AATGGAGACGCTGCTCTGAAGGATCGGGAGACAGACATTCTGGATGACGAGATGCCCC | |
| | ACCACGACCTGCACAGTGTGGACAGCCTTGGGACCCTGTCCTCCTCGGAAGGGCCTCA | |
| | GTCGGCCCACCTGGGTCCCTTCACCTGCCACAAGAGCAGCCAGAACTCACTCCTATCT | |
| | GACGGTTTTGGCAGCAACGTTGGTGAAGATCCGCAGGGCACCCTCGTTCCGGACCTGG | |
| | GCCTTGGCATGGACGGCCCCTATGAGCGGGAGCGGACTTTTGGGAGTCGAGAGCCCAA | |
| | GCAGCCCCAGCCCCTGCTGAGAAAGCCCTCAGTGTCCGCCCAGATGCAGGCCTATGGG | |
| | CAGAGCAGCTACTCCACACAGACCTGGGTGCGCCAGCAGCAGATGGTTGTAGCTCACC | |
| | AGTATAGCTTCGCCCCAGATGGGGAGGCCCGGCTGGTGAGCCGCTGCCCTGCAGACAA | |
| | TCCTGGCCTCGTCCAGGCCCAGCCCAGAGTGCCACTCACCCCCACCCGAGGGACCAGC | |
| | AGTAGGGTGGCTGTCCAGAGGGGTGTAGGCAGTGGGCCACATCCCCCTGACACACAGC | |
| | AGCCCTCTCCCAGCAAAGCGTTCAAACCCAGGTTTCCAGGAGACCAGGTTGTGAATGG | |
| | AGCCGGCCCAGAGCTGAGCACAGGCCCCTCCCCAGGCTCGCCCACCCTGGACATCGAC | |
| | CAGTCCATCGAGCAGCTCAACAGGCTGATCCTGGAGCTGGATCCCACCTTCGAGCCCA | |
| | TCCCTACCCACATGAACGCCCTCGGTAGCCAGGCCAATGGCTCTGTGTCTCCAGACAG | |
| | CGTGGGAGGTGGGCTCCGGGCAAGCAGCAGGCTGCCTGACACAGGAGAGGGCCCCAGC | |
| | AGGGCCACCGGGCGGCAAGGCTCCTCTGCTGAACAGCCCCTGGGCGGGAGACTCAGGA | |
| | AGCTGAGCCTGGGGCAGTACGACAACGATGCTGGGGGGCAGCTGCCCTTCTCCAAATG | |
| | TGCATGGGGAAAGGCTGGTGTGGACTATGCCCCAAACCTGCCGCCATTCCCCTCACCA | |
| | GCGGACGTCAAAGAGACGATGACCCCTGGCTATCCCCAGGACCTCGATATTATCGATG | |
| | GCAGAATTTTAAGTAGCAAGGAGTCCATGTGTTCAACTCCAGCATTTCCTGTGTCTCC | |
| | AGAGACACCGTATGTGAAAACAGCGCTGCGCCATCCTCCGTTCAGCCCACCTGAGCCC | |
| | CCGCTGAGCAGCCCAGCCAGTCAGCACAAAGGAGGACGTGAACCACGAAGCTGCCCTG | |
| | AGACGCTCACTCACGCTGTGGGGATGTCAGAGAGCCCCATCGGACCCAAATCCACGAT | |
| | GCTCCGGGCTGATGCGTCCTCGACGCCCTCCTTTCAGCAGGCTTTTGCTTCTTCCTGC | |
| | ACCATTTCCAGCAACGGCCCTGGGCAGAGGAGAGAGAGCTCCTCTTCTGCAGAACGCC | |
| | AGTGGGTGGAGAGCAGCCCCAAGCCCATGGTTTCCCTGCTGGGGAGCGGCCGGCCCAC | |
| | CGGAAGTCCCCTCAGCGCTGAGTTCTCCGGTACCAGGAAGGACTCCCCAGTGCTGTCC | |
| | TGCTTCCCGCCGTCAGAGCTCCAGGCTCCTTTCCACAGCCATGAGCTGTCCCTAGCAG | |
| | AGCCACCGGACTCCCTGGCGCCTCCCAGCAGCCAGGCCTTCCTGGGCTTCGGCACCGC | |
| | CCCAGTGGGAAGTGGCCTTCCGCCCGAGGAGGACCTGGGGGCCTTGCTGGCCAATTCT | |
| | CATGGAGCGTCACCGACCCCCAGCATCCCGCTGACAGCGACAGGGGCTGCCGACAATG | |
| | GCTTCCTGTCCCACAACTTTCTCACGGTGGCGCCTGGACACAGCAGCCACCACAGTCC | |
| | AGGCCTGCAGGGCCAGGGTGTGACCCTGCCCGGGCAGCCACCCCTCCCTGAGAAGAAG | |
| | CGGGCCTCGGAGGGGGATCGTTCTTTGGGCTCAGTCTCTCCCTCCTCCAGTGGCTTCT | |
| | CCAGCCCGCACAGCGGGAGCACCATCAGTATCCCCTTCCCAAATGTCCTTCCCGACTT | |
| | TTCCAAGGCTTCAGAAGCGGCCTCACCTCTGCCAGATAGTCCAGGTGATAAACTTGTG | |
| | ATCGTGAAATTTGTTCAAGACACTTCCAAGTTCTGGTACAAGGCGGATATTTCAAGAG | |
| | AACAAGCCATCGCCATGTTGAAGGACAAGGAGCCGGGCTCATTCATTGTTCGAGACAG | |
| | CCATTCCTTCCGAGGGGCCTATGGCCTGGCCATGAAGGTGGCCACGCCCCCACCTTCA | |
| | GTCCTGCAGCTGAACAAGAAAGCTGGAGATTTGGCCAATGAACTCGTCCGGCACTTTT | |
| | TGATCGAGTGTACCCCGAAGGGAGTGCGGTTGAAAGGGTGCTCGAATGAACCATATTT | |
| | CGTGTACCGCCGGAAGCACCAGGAGCTGCAAGCCATGCAGATGGAGCTGCAGAGCCCT | |
| | GAGTACAAGCTGAGCAAGCTCCGCACCTCGACCATCATGACCGACTACAACCCCAACT | |
| | ACTGCTTTGCTGGCAAGACCTCCTCCATCAGTGACCTGAAGGAGGTGCCGCGGAAAAA | |
| | CATCACCCTCATTCGGGGTCTGGGCCATGGCGCCTTTGGGGAGGTGTATGAAGGCCAG | |
| | GTGTCCGGAATGCCCAACGACCCAAGCCCCCTGCAAGTGGCTGTGAAGACGCTGCCTG | |
| | AAGTGTGCTCTGAACAGGACGAACTGGATTTCCTCATGGAAGCCCTGATCATCAGCAA | |
| | ATTCAACCACCAGAACATTGTTCGCTGCATTGGGGTGAGCCTGCAATCCCTGCCCCGG | |
| | TTCATCCTGCTGGAGCTCATGGCGGGGGGAGACCTCAAGTCCTTCCTCCGAGAGACCC | |
| | GCCCTCGCCCGAGCCAGCCCTCCTCCCTGGCCATGCTGGACCTTCTGCACGTGGCTCG | |
| | GGACATTGCCTGTGGCTGTCAGTATTTGGAGGAAAACCACTTCATCCACCGAGACATT | |
| | GCTGCCAGAAACTGCCTCTTGACCTGTCCAGGCCCTGGAAGAGTGGCCAAGATTGGAG | |
| | ACTTCGGGATGGCCCGAGACATCTACAGGGCGAGCTACTATAGAAAGGGAGGCTGTGC | |
| | CATGCTGCCAGTTAAGTGGATGCCCCCAGAGGCCTTCATGGAAGGAATATTCACTTCT | |
| | AAAACAGACACATGGTCCTTTGGAGTGCTGCTATGGGAAATCTTTTCTCTTGGATATA | |
| | TGCCATACCCCAGCAAAAGCAACCAGGAAGTTCTGGAGTTTGTCACCAGTGGAGGCCG | |
| | GATGGACCCACCCAAGAACTGCCCTGGGCCTGTATACCGGATAATGACTCAGTGCTGG | |
| | CAACATCAGCCTGAAGACAGGCCCAACTTTGCCATCATTTTGGAGAGGATTGAATACT | |
| | GCACCCAGGACCCGGATGTAATCAACACCGCTTTGCCGATAGAATATGGTCCACTTGT | |
| | GGAAGAGGAAGAGAAAGTGCCTGTGAGGCCCAAGGACCCTGAGGGGGTTCCTCCTCTC | |
| | CTGGTCTCTCAACAGGCAAAACGGGAGGAGGAGCGCAGCCCAGCTGCCCCACCACCTC | |
| | TGCCTACCACCTCCTCTGGCAAGGCTGCAAAGAAACCCACAGCTGCAGAGATCTCTGT | |
| | TCGAGTCCCTAGAGGGCCGGCCGTGGAAGGGGGACACGTGAATATGGCATTCTCTCAG | |
| | TCCAACCCTCCTTCGGAGTTGCACAAGGTCCACGGATCCAGAAACAAGCCCACCAGCT | |
| | TGTGGAACCCAACGTACGGCTCCTGGTTTACAGAGAAACCCACCAAAAAGAATAATCC | |
| | TATAGCAAAGAAGGAGCCACACGACAGGGGTAACCTGGGGCTGGAGGGAAGCTGTACT | |
| | GTCCCACCTAACGTTGCAACTGGGAGACTTCCGGGGGCCTCACTGCTCCTAGAGCCCT | |
| | CTTCGCTGACTGCCAATATGAAGGAGGTACCTCTGTTCAGGCTACGTCACTTCCCTTG | |
| | TGGGAATGTCAATTACGGCTACCAGCAACAGGGCTTGCCCTTAGAAGCCGCTACTGCC | |
| | CCTGGAGCTGGTCATTACGAGGATACCATTCTGAAAAGCAAGAATAGCATGAACCAGC | |
| | CTGGGCCCTGA | |
| ALK- | ATGGAGGAAAAGGAAGATAAGCATCAACAGCATAAAATAGAGGATGCTGCTATAACAT | 9 |
| C2orf73 | ATGTAAGTGAAAATGAAGAAATTAAACACGAAGAAAAACCTGGAAAAAGCATACATCA | |
| | TTCAAAATCACATGTTGGAAGAGGACGTATATATTATGCTAAATTCATTAACACAAAT | |
| | GCAAGAACATACAATGAACCATTTCCCTACATAGATCCCAAAAAAGGGCCAGAAATAC | |
| | AGGGTGACTGGTGGTCACATGGTAAAGCACTGGAACCTGTCTTCCTACCACCTTACGA | |
| | CTCTAAGAGCACCCAGAGGAGTGACTTCCAAAAACCATCGTGTCCACTGGTTTTGCCA | |
| | GTCAAACACAGCAAGATGCAAAAGCCTTCTTGTGGAATAGTGTACCGCCGGAAGCACC | |
| | AGGAGCTGCAAGCCATGCAGATGGAGCTGCAGAGCCCTGAGTACAAGCTGAGCAAGCT | |
| | CCGCACCTCGACCATCATGACCGACTACAACCCCAACTACTGCTTTGCTGGCAAGACC | |
| | TCCTCCATCAGTGACCTGAAGGAGGTGCCGCGGAAAAACATCACCCTCATTCGGGGTC | |
| | TGGGCCATGGCGCCTTTGGGGAGGTGTATGAAGGCCAGGTGTCCGGAATGCCCAACGA | |
| | CCCAAGCCCCCTGCAAGTGGCTGTGAAGACGCTGCCTGAAGTGTGCTCTGAACAGGAC | |
| | GAACTGGATTTCCTCATGGAAGCCCTGATCATCAGCAAATTCAACCACCAGAACATTG | |
| | TTCGCTGCATTGGGGTGAGCCTGCAATCCCTGCCCCGGTTCATCCTGCTGGAGCTCAT | |
| | GGCGGGGGGAGACCTCAAGTCCTTCCTCCGAGAGACCCGCCCTCGCCCGAGCCAGCCC | |
| | TCCTCCCTGGCCATGCTGGACCTTCTGCACGTGGCTCGGGACATTGCCTGTGGCTGTC | |
| | AGTATTTGGAGGAAAACCACTTCATCCACCGAGACATTGCTGCCAGAAACTGCCTCTT | |
| | GACCTGTCCAGGCCCTGGAAGAGTGGCCAAGATTGGAGACTTCGGGATGGCCCGAGAC | |
| | ATCTACAGGGCGAGCTACTATAGAAAGGGAGGCTGTGCCATGCTGCCAGTTAAGTGGA | |
| | TGCCCCCAGAGGCCTTCATGGAAGGAATATTCACTTCTAAAACAGACACATGGTCCTT | |
| | TGGAGTGCTGCTATGGGAAATCTTTTCTCTTGGATATATGCCATACCCCAGCAAAAGC | |
| | AACCAGGAAGTTCTGGAGTTTGTCACCAGTGGAGGCCGGATGGACCCACCCAAGAACT | |
| | GCCCTGGGCCTGTATACCGGATAATGACTCAGTGCTGGCAACATCAGCCTGAAGACAG | |
| | GCCCAACTTTGCCATCATTTTGGAGAGGATTGAATACTGCACCCAGGACCCGGATGTA | |
| | ATCAACACCGCTTTGCCGATAGAATATGGTCCACTTGTGGAAGAGGAAGAGAAAGTGC | |
| | CTGTGAGGCCCAAGGACCCTGAGGGGGTTCCTCCTCTCCTGGTCTCTCAACAGGCAAA | |
| | ACGGGAGGAGGAGCGCAGCCCAGCTGCCCCACCACCTCTGCCTACCACCTCCTCTGGC | |
| | AAGGCTGCAAAGAAACCCACAGCTGCAGAGATCTCTGTTCGAGTCCCTAGAGGGCCGG | |
| | CCGTGGAAGGGGGACACGTGAATATGGCATTCTCTCAGTCCAACCCTCCTTCGGAGTT | |
| | GCACAAGGTCCACGGATCCAGAAACAAGCCCACCAGCTTGTGGAACCCAACGTACGGC | |
| | TCCTGGTTTACAGAGAAACCCACCAAAAAGAATAATCCTATAGCAAAGAAGGAGCCAC | |
| | ACGACAGGGGTAACCTGGGGCTGGAGGGAAGCTGTACTGTCCCACCTAACGTTGCAAC | |
| | TGGGAGACTTCCGGGGGCCTCACTGCTCCTAGAGCCCTCTTCGCTGACTGCCAATATG | |
| | AAGGAGGTACCTCTGTTCAGGCTACGTCACTTCCCTTGTGGGAATGTCAATTACGGCT | |
| | ACCAGCAACAGGGCTTGCCCTTAGAAGCCGCTACTGCCCCTGGAGCTGGTCATTACGA | |
| | GGATACCATTCTGAAAAGCAAGAATAGCATGAACCAGCCTGGGCCCTGA | |
| ALK-AZI2 | ATGGATGCACTGGTAGAAGATGATATCTGTATTCTGAATCATGAAAAAGCCCATAAGA | 10 |
| | GAGATACAGTGACTCCAGTTTCAATATATTCAGGAGATGAATCTGTTGCTTCCCATTT | |
| | TGCTCTTGTCACTGCATATGAAGACATCAAAAAACGACTTAAGGATTCAGAGAAAGAG | |
| | AACTCTTTGTTAAAGAAGAGAATAAGATTTTTGGAAGAAAAGCTAATAGCTCGATTTG | |
| | AAGAAGAAACAAGTTCCGTGGGACGAGAACAAGTAAATAAGGCCTATCATGCATATCG | |
| | AGAGGTTTGCATTGATAGAGATAATTTGAAGAGCAAACTGGACAAAATGAATAAAGAC | |
| | AACTCTGAATCTTTGAAAGTATTGAATGAGCAGCTACAATCTAAAGAAGTAGAACTCC | |
| | TCCAGCTGAGGACAGAGGTGGAAACTCAGCAGGTGATGAGGAATTTAAATCCACCTTC | |
| | ATCAAACTGGGAGGTGGAAAAGTTGAGCTGTGACCTGAAGATCCATGGTTTGGAACAA | |
| | GAGCTGGAACTGATGAGGAAAGAATGTAGCGATCTCAAAATAGAACTACAGAAAGCCA | |
| | AACAAACGGATCCATATCAGGAAGACAATCTGAAGAGCAGAGATCTCCAAAAACTAAG | |
| | CATTTCAAGTGATAATATGCAGCATGCATACTGGGAACTGAAGAGAGAAATGTCTAAT | |
| | TTACATCTGGTGACTCAAGTACAAGCTGAACTACTAAGAAAACTGAAAACCTCAACTG | |
| | CAATCAAGAAAGTGTACCGCCGGAAGCACCAGGAGCTGCAAGCCATGCAGATGGAGCT | |
| | GCAGAGCCCTGAGTACAAGCTGAGCAAGCTCCGCACCTCGACCATCATGACCGACTAC | |
| | AACCCCAACTACTGCTTTGCTGGCAAGACCTCCTCCATCAGTGACCTGAAGGAGGTGC | |
| | CGCGGAAAAACATCACCCTCATTCGGGGTCTGGGCCATGGCGCCTTTGGGGAGGTGTA | |
| | TGAAGGCCAGGTGTCCGGAATGCCCAACGACCCAAGCCCCCTGCAAGTGGCTGTGAAG | |
| | ACGCTGCCTGAAGTGTGCTCTGAACAGGACGAACTGGATTTCCTCATGGAAGCCCTGA | |
| | TCATCAGCAAATTCAACCACCAGAACATTGTTCGCTGCATTGGGGTGAGCCTGCAATC | |
| | CCTGCCCCGGTTCATCCTGCTGGAGCTCATGGCGGGGGGAGACCTCAAGTCCTTCCTC | |
| | CGAGAGACCCGCCCTCGCCCGAGCCAGCCCTCCTCCCTGGCCATGCTGGACCTTCTGC | |
| | ACGTGGCTCGGGACATTGCCTGTGGCTGTCAGTATTTGGAGGAAAACCACTTCATCCA | |
| | CCGAGACATTGCTGCCAGAAACTGCCTCTTGACCTGTCCAGGCCCTGGAAGAGTGGCC | |
| | AAGATTGGAGACTTCGGGATGGCCCGAGACATCTACAGGGCGAGCTACTATAGAAAGG | |
| | GAGGCTGTGCCATGCTGCCAGTTAAGTGGATGCCCCCAGAGGCCTTCATGGAAGGAAT | |
| | ATTCACTTCTAAAACAGACACATGGTCCTTTGGAGTGCTGCTATGGGAAATCTTTTCT | |
| | CTTGGATATATGCCATACCCCAGCAAAAGCAACCAGGAAGTTCTGGAGTTTGTCACCA | |
| | GTGGAGGCCGGATGGACCCACCCAAGAACTGCCCTGGGCCTGTATACCGGATAATGAC | |
| | TCAGTGCTGGCAACATCAGCCTGAAGACAGGCCCAACTTTGCCATCATTTTGGAGAGG | |
| | ATTGAATACTGCACCCAGGACCCGGATGTAATCAACACCGCTTTGCCGATAGAATATG | |
| | GTCCACTTGTGGAAGAGGAAGAGAAAGTGCCTGTGAGGCCCAAGGACCCTGAGGGGGT | |
| | TCCTCCTCTCCTGGTCTCTCAACAGGCAAAACGGGAGGAGGAGCGCAGCCCAGCTGCC | |
| | CCACCACCTCTGCCTACCACCTCCTCTGGCAAGGCTGCAAAGAAACCCACAGCTGCAG | |
| | AGATCTCTGTTCGAGTCCCTAGAGGGCCGGCCGTGGAAGGGGGACACGTGAATATGGC | |
| | ATTCTCTCAGTCCAACCCTCCTTCGGAGTTGCACAAGGTCCACGGATCCAGAAACAAG | |
| | CCCACCAGCTTGTGGAACCCAACGTACGGCTCCTGGTTTACAGAGAAACCCACCAAAA | |
| | AGAATAATCCTATAGCAAAGAAGGAGCCACACGACAGGGGTAACCTGGGGCTGGAGGG | |
| | AAGCTGTACTGTCCCACCTAACGTTGCAACTGGGAGACTTCCGGGGGCCTCACTGCTC | |
| | CTAGAGCCCTCTTCGCTGACTGCCAATATGAAGGAGGTACCTCTGTTCAGGCTACGTC | |
| | ACTTCCCTTGTGGGAATGTCAATTACGGCTACCAGCAACAGGGCTTGCCCTTAGAAGC | |
| | CGCTACTGCCCCTGGAGCTGGTCATTACGAGGATACCATTCTGAAAAGCAAGAATAGC | |
| | ATGAACCAGCCTGGGCCCTGA | |
| ALK- | ATGCGCCTCCACCTGCTCCTGCTGCTCGCGCTGTGCGGTGCAGGCACCACCGCCGCGG | 11 |
| MANBA | AGCTCAGTTACAGCTTGCGTGGCAACTGGAGCATCTGCAATGGGAACGGCTCGCTGGA | |
| | GCTGCCCGGGGCGGTCCCTGGCTGCGTGCACAGCGCCTTGTTCCAGCAGGGCCTGATC | |
| | CAGGATTCTTACTACAGATTTAATGACCTTAACTACAGATGGGTCTCTTTGGATAACT | |
| | GGACCTATAGCAAAGAATTTAAAATCCCCTTTGAAATTAGCAAATGGCAAAAAGTAAA | |
| | TTTGATTCTTGAGGGAGTGGATACGGTTTCAAAAATCCTGTTCAATGAAGTCACTATT | |
| | GGGGAAACAGACAATATGTTCAATAGATATAGCTTTGATATTACCAACGTGGTCAGGG | |
| | ACGTGAACTCCATTGAGCTGCGTTTCCAGTCAGCGGTGTTGTATGCAGCACAGCAGAG | |
| | CAAAGCTCACACTCGCTACCAGGTTCCCCCAGACTGCCCTCCACTTGTGCAGAAGGGT | |
| | GAATGCCATGTCAACTTTGTTCGGAAGGAGCAATGTTCCTTTAGTTGGGACTGGGGGC | |
| | CTTCCTTTCCTACCCAGGGAATCTGGAAAGATGTTAGAATTGAAGCCTATAATATTTG | |
| | TCACCTGAACTACTTCACATTTTCCCCAATATATGATAAGAGTGCCCAGGAGTGGAAT | |
| | CTGGAAATAGAGTCTACATTTGATGTTGTCAGCTCAAAGCCAGTTGGTGGTCAAGTGA | |
| | TCGTAGCCATCCCTAAGTTGCAAACACAACAGACATACAGCATTGAACTTCAACCTGG | |
| | GAAAAGGATTGTTGAGCTATTTGTGAACATTAGCAAGAATATTACTGTAGAAACTTGG | |
| | TGGCCTCATGGACATGGAAACCAGACTGGGTACAACATGACTGTTCTTTTTGAACTGG | |
| | ATGGAGGCTTAAATATTGAAAAATCAGCTAAGGTTTATTTTAGGACAGTGGAACTTAT | |
| | AGAAGAGCCTATAAAAGGGTCTCCTGGTTTGAGTTTCTATTTCAAAATTAATGGATTT | |
| | CCCATATTTCTAAAAGGCTCAAACTGGATCCCAGCAGATTCATTCCAGGACCGAGTAA | |
| | CCTCTGAGTTGTTACGGCTCCTTTTACAGTCTGTTGTGGATGCTAATATGAATACTCT | |
| | TCGGGTTTGGGGAGGAGGAATTTATGAGCAGGATGAATTCTATGAACTCTGTGATGAA | |
| | CTAGGAATAATGGTATGGCAGGATTTTATGTTTGCCTGTGCCCTTTATCCAACTGATC | |
| | AGGGCTTCCTGGATTCAGTGACAGCAGAAGTTGCCTACCAGATCAAGAGACTGAAATC | |
| | TCATCCTTCTATCATCATATGGAGTGGCAATAATGAAAATGAGGAGGCGCTGATGATG | |
| | AATTGGTATCATATCAGTTTCACTGACCGGCCAATCTACATCAAGGACTATGTGACAC | |
| | TCTATGTGAAAAACATCAGAGAGCTCGTACTGGCAGGAGACAAGAGTCGTCCTTTTAT | |
| | TACGTCCAGTCCTACAAATGGGGCTGAAACTGTTGCAGAAGCCTGGGTCTCTCAAAAC | |
| | CCTAATAGCAATTATTTTGGTGATGTACATTTTTATGACTATATCAGTGATTGCTGGA | |
| | ACTGGAAAGTTTTCCCAAAAGCTCGATTTGCATCTGAATATGGATATCAGTCCTGGCC | |
| | GTCCTTCAGTACATTAGAAAAGGTCTCGTCTACAGAGGACTGGTCTTTCAATAGCAAG | |
| | TTTTCACTTCATCGACAACATCACGAAGGTGGTAACAAACAAATGCTTTATCAGGCTG | |
| | GACTTCATTTCAAACTCCCCCAAAGCACAGATCCATTACGCACATTTAAAGATACCAT | |
| | CTACCTTACTCAGGTGATGCAGGCCCAGTGTGTCAAAACAGAAACTGAATTCTACCGC | |
| | CGTAGTCGCAGCGAGATAGTGGATCAGCAAGGGCACACGATGGGGGCACTTTATTGGC | |
| | AGTTGAATGACATCTGGCAAGCTCCTTCCTGGGCTTCTCTTGTGTACCGCCGGAAGCA | |
| | CCAGGAGCTGCAAGCCATGCAGATGGAGCTGCAGAGCCCTGAGTACAAGCTGAGCAAG | |
| | CTCCGCACCTCGACCATCATGACCGACTACAACCCCAACTACTGCTTTGCTGGCAAGA | |
| | CCTCCTCCATCAGTGACCTGAAGGAGGTGCCGCGGAAAAACATCACCCTCATTCGGGG | |
| | TCTGGGCCATGGCGCCTTTGGGGAGGTGTATGAAGGCCAGGTGTCCGGAATGCCCAAC | |
| | GACCCAAGCCCCCTGCAAGTGGCTGTGAAGACGCTGCCTGAAGTGTGCTCTGAACAGG | |
| | ACGAACTGGATTTCCTCATGGAAGCCCTGATCATCAGCAAATTCAACCACCAGAACAT | |
| | TGTTCGCTGCATTGGGGTGAGCCTGCAATCCCTGCCCCGGTTCATCCTGCTGGAGCTC | |
| | ATGGCGGGGGGAGACCTCAAGTCCTTCCTCCGAGAGACCCGCCCTCGCCCGAGCCAGC | |
| | CCTCCTCCCTGGCCATGCTGGACCTTCTGCACGTGGCTCGGGACATTGCCTGTGGCTG | |
| | TCAGTATTTGGAGGAAAACCACTTCATCCACCGAGACATTGCTGCCAGAAACTGCCTC | |
| | TTGACCTGTCCAGGCCCTGGAAGAGTGGCCAAGATTGGAGACTTCGGGATGGCCCGAG | |
| | ACATCTACAGGGCGAGCTACTATAGAAAGGGAGGCTGTGCCATGCTGCCAGITAAGTG | |
| | GATGCCCCCAGAGGCCTTCATGGAAGGAATATTCACTTCTAAAACAGACACATGGTCC | |
| | TTTGGAGTGCTGCTATGGGAAATCTTTTCTCTTGGATATATGCCATACCCCAGCAAAA | |
| | GCAACCAGGAAGTTCTGGAGTTTGTCACCAGTGGAGGCCGGATGGACCCACCCAAGAA | |
| | CTGCCCTGGGCCTGTATACCGGATAATGACTCAGTGCTGGCAACATCAGCCTGAAGAC | |
| | AGGCCCAACTTTGCCATCATTTTGGAGAGGATTGAATACTGCACCCAGGACCCGGATG | |
| | TAATCAACACCGCTTTGCCGATAGAATATGGTCCACTTGTGGAAGAGGAAGAGAAAGT | |
| | GCCTGTGAGGCCCAAGGACCCTGAGGGGGTTCCTCCTCTCCTGGTCTCTCAACAGGCA | |
| | AAACGGGAGGAGGAGCGCAGCCCAGCTGCCCCACCACCTCTGCCTACCACCTCCTCTG | |
| | GCAAGGCTGCAAAGAAACCCACAGCTGCAGAGATCTCTGTTCGAGTCCCTAGAGGGCC | |
| | GGCCGTGGAAGGGGGACACGTGAATATGGCATTCTCTCAGTCCAACCCTCCTTCGGAG | |
| | TTGCACAAGGTCCACGGATCCAGAAACAAGCCCACCAGCTTGTGGAACCCAACGTACG | |
| | GCTCCTGGTTTACAGAGAAACCCACCAAAAAGAATAATCCTATAGCAAAGAAGGAGCC | |
| | ACACGACAGGGGTAACCTGGGGCTGGAGGGAAGCTGTACTGTCCCACCTAACGTTGCA | |
| | ACTGGGAGACTTCCGGGGGCCTCACTGCTCCTAGAGCCCTCTTCGCTGACTGCCAATA | |
| | TGAAGGAGGTACCTCTGTTCAGGCTACGTCACTTCCCTTGTGGGAATGTCAATTACGG | |
| | CTACCAGCAACAGGGCTTGCCCTTAGAAGCCGCTACTGCCCCTGGAGCTGGTCATTAC | |
| | GAGGATACCATTCTGAAAAGCAAGAATAGCATGAACCAGCCTGGGCCCTGA | |
| ALK- | ATGGATTCTTTACCACGGCTGACCAGCGTTTTGACTTTGCTGTTCTCTGGCTTGTGGC | 12 |
| CNTNAP5 | ATTTAGGATTAACAGCGACAAACTACAACTGTGATGATCCACTAGCATCCCTGCTCTC | |
| | TCCAATGGCTTTTTCCAGTTCCTCAGACCTCACTGGCACTCACAGCCCAGCTCAACTC | |
| | AACTGGAGAGTTGTGTACCGCCGGAAGCACCAGGAGCTGCAAGCCATGCAGATGGAGC | |
| | TGCAGAGCCCTGAGTACAAGCTGAGCAAGCTCCGCACCTCGACCATCATGACCGACTA | |
| | CAACCCCAACTACTGCTTTGCTGGCAAGACCTCCTCCATCAGTGACCTGAAGGAGGTG | |
| | CCGCGGAAAAACATCACCCTCATTCGGGGTCTGGGCCATGGCGCCTTTGGGGAGGTGT | |
| | ATGAAGGCCAGGTGTCCGGAATGCCCAACGACCCAAGCCCCCTGCAAGTGGCTGTGAA | |
| | GACGCTGCCTGAAGTGTGCTCTGAACAGGACGAACTGGATTTCCTCATGGAAGCCCTG | |
| | ATCATCAGCAAATTCAACCACCAGAACATTGTTCGCTGCATTGGGGTGAGCCTGCAAT | |
| | CCCTGCCCCGGTTCATCCTGCTGGAGCTCATGGCGGGGGGAGACCTCAAGTCCTTCCT | |
| | CCGAGAGACCCGCCCTCGCCCGAGCCAGCCCTCCTCCCTGGCCATGCTGGACCTTCTG | |
| | CACGTGGCTCGGGACATTGCCTGTGGCTGTCAGTATTTGGAGGAAAACCACTTCATCC | |
| | ACCGAGACATTGCTGCCAGAAACTGCCTCTTGACCTGTCCAGGCCCTGGAAGAGTGGC | |
| | CAAGATTGGAGACTTCGGGATGGCCCGAGACATCTACAGGGCGAGCTACTATAGAAAG | |
| | GGAGGCTGTGCCATGCTGCCAGTTAAGTGGATGCCCCCAGAGGCCTTCATGGAAGGAA | |
| | TATTCACTTCTAAAACAGACACATGGTCCTTTGGAGTGCTGCTATGGGAAATCTTTTC | |
| | TCTTGGATATATGCCATACCCCAGCAAAAGCAACCAGGAAGTTCTGGAGTTTGTCACC | |
| | AGTGGAGGCCGGATGGACCCACCCAAGAACTGCCCTGGGCCTGTATACCGGATAATGA | |
| | CTCAGTGCTGGCAACATCAGCCTGAAGACAGGCCCAACTTTGCCATCATTTTGGAGAG | |
| | GATTGAATACTGCACCCAGGACCCGGATGTAATCAACACCGCTTTGCCGATAGAATAT | |
| | GGTCCACTTGTGGAAGAGGAAGAGAAAGTGCCTGTGAGGCCCAAGGACCCTGAGGGGG | |
| | TTCCTCCTCTCCTGGTCTCTCAACAGGCAAAACGGGAGGAGGAGCGCAGCCCAGCTGC | |
| | CCCACCACCTCTGCCTACCACCTCCTCTGGCAAGGCTGCAAAGAAACCCACAGCTGCA | |
| | GAGATCTCTGTTCGAGTCCCTAGAGGGCCGGCCGTGGAAGGGGGACACGTGAATATGG | |
| | CATTCTCTCAGTCCAACCCTCCTTCGGAGTTGCACAAGGTCCACGGATCCAGAAACAA | |
| | GCCCACCAGCTTGTGGAACCCAACGTACGGCTCCTGGTTTACAGAGAAACCCACCAAA | |
| | AAGAATAATCCTATAGCAAAGAAGGAGCCACACGACAGGGGTAACCTGGGGCTGGAGG | |
| | GAAGCTGTACTGTCCCACCTAACGTTGCAACTGGGAGACTTCCGGGGGCCTCACTGCT | |
| | CCTAGAGCCCTCTTCGCTGACTGCCAATATGAAGGAGGTACCTCTGTTCAGGCTACGT | |
| | CACTTCCCTTGTGGGAATGTCAATTACGGCTACCAGCAACAGGGCTTGCCCTTAGAAG | |
| | CCGCTACTGCCCCTGGAGCTGGTCATTACGAGGATACCATTCTGAAAAGCAAGAATAG | |
| | CATGAACCAGCCTGGGCCCTGA | |
| ALK- | ATGGCGGCCCGACAGGCCGTGGGCAGCGGGGCTCAGGAGACATGCGGTCTGGATCGGA | 14 |
| TANGO6 | TTTTGGAGGCATTGAAGCTGCTGCTGAGCCCGGGAGGTCATAGCTCCTTGGAATCACC | |
| | AACAAACATGCCTTCTCCTTCTCCTGATTATTTTACATGGAATCTCACCTGGATAATG | |
| | AAAGACTCCTTCCCTTTCCTGTCTCATCGCAGCCGATATGGTCTGGAGTGCAGCTTTG | |
| | ACTTCCCCTGTGAGCTGGAGTATTCCCCTCCACTGCATGACCTCAGGAACCAGAGCTG | |
| | GTCCTGGCGCCGCATCCCCTCCGAGGAGGCCTCCCAGATGGACTTGCTGGATGGGCCT | |
| | GGGGCAGAGCGTTCTAAGGAGATGCCCAGAGGCTCCTTTCTCCTTCTCAACACCTCAG | |
| | CTGACTCCAAGCACACCATCCTGAGTCCGTGGATGAGGAGCAGCAGTGAGCACTGCAC | |
| | ACTGGCCGTCTCGGTGCACAGGCACCTGCAGCCCTCTGGAAGGTACATTGCCCAGCTG | |
| | CTGCCCCACAACGAGGCTGCAAGAGAGATCCTCCTGATGCCCACTCCAGGGAAGCATG | |
| | GTTGGACAGTGCTCCAGGGAAGAATCGGGCGTCCAGACAACCCATTTCGAGTGGCCCT | |
| | GGAATACATCTCCAGTGGAAACCGCAGCTTGTCTGCAGTGGACTTCTTTGCCCTGAAG | |
| | AACTGCAGTGAAGGAACATCCCCAGGCTCCAAGATGGCCCTGCAGAGCTCCTTCACTT | |
| | GTTGGAATGGGACAGTCCTCCAGCTTGGGCAGGCCTGTGACTTCCACCAGGACTGTGC | |
| | CCAGGGAGAAGATGAGAGCCAGATGTGCCGGAAACTGCCTGTGGGTTTTTACTGCAAC | |
| | TTTGAAGATGGCTTCTGTGGCTGGACCCAAGGCACACTGTCACCCCACACTCCTCAAT | |
| | GGCAGGTCAGGACCCTAAAGGATGCCCGGTTCCAGGACCACCAAGACCATGCTCTATT | |
| | GCTCAGTACCACTGATGTCCCCGCTTCTGAAAGTGCTACAGTGACCAGTGCTACGTTT | |
| | CCTGCACCGATCAAGAGCTCTCCATGTGAGCTCCGAATGTCCTGGCTCATTCGTGGAG | |
| | TCTTGAGGGGAAACGTGTCCTTGGTGCTAGTGGAGAACAAAACCGGGAAGGAGCAAGG | |
| | CAGGATGGTCTGGCATGTCGCCGCCTATGAAGGCTTGAGCCTGTGGCAGTGGATGGTG | |
| | TTGCCTCTCCTCGATGTGTCTGACAGGTTCTGGCTGCAGATGGTCGCATGGTGGGGAC | |
| | AAGGATCCAGAGCCATCGTGGCTTTTGACAATATCTCCATCAGCCTGGACTGCTACCT | |
| | CACCATTAGCGGAGAGGACAAGATCCTGCAGAATACAGCACCCAAATCAAGAAACCTG | |
| | TTTGAGAGAAACCCAAACAAGGAGCTGAAACCCGGGGAAAATTCACCAAGACAGACCC | |
| | CCATCTTTGACCCTACAGTTCATTGGCTGTTCACCACATGTGGGGCCAGCGGGCCCCA | |
| | TGGCCCCACCCAGGCACAGTGCAACAACGCCTACCAGAACTCCAACCTGAGCGTGGAG | |
| | GTGGGGAGCGAGGGCCCCCTGAAAGGCATCCAGATCTGGAAGGTGCCAGCCACCGACA | |
| | CCTACAGCATCTCGGGCTACGGAGCTGCTGGCGGGAAAGGCGGGAAGAACACCATGAT | |
| | GCGGTCCCACGGCGTGTCTGTGCTGGGCATCTTCAACCTGGAGAAGGATGACATGCTG | |
| | TACATCCTGGTTGGGCAGCAGGGAGAGGACGCCTGCCCCAGTACAAACCAGTTAATCC | |
| | AGAAAGTCTGCATTGGAGAGAACAATGTGATAGAAGAAGAAATCCGTGTGAACAGAAG | |
| | CGTGCATGAGTGGGCAGGAGGCGGAGGAGGAGGGGGTGGAGCCACCTACGTATTTAAG | |
| | ATGAAGGATGGAGTGCCGGTGCCCCTGATCATTGCAGCCGGAGGTGGTGGCAGGGCCT | |
| | ACGGGGCCAAGACAGACACGTTCCACCCAGAGAGACTGGAGAATAACTCCTCGGTTCT | |
| | AGGGCTAAACGGCAATTCCGGAGCCGCAGGTGGTGGAGGTGGCTGGAATGATAACACT | |
| | TCCTTGCTCTGGGCCGGAAAATCTTTGCAGGAGGGTGCCACCGGAGGACATTCCTGCC | |
| | CCCAGGCCATGAAGAAGTGGGGGTGGGAGACAAGAGGGGGTTTCGGAGGGGGTGGAGG | |
| | GGGGTGCTCCTCAGGTGGAGGAGGCGGAGGATATATAGGCGGCAATGCAGCCTCAAAC | |
| | AATGACCCCGAAATGGATGGGGAAGATGGGGTTTCCTTCATCAGTCCACTGGGCATCC | |
| | TGTACACCCCAGCTTTAAAAGTGATGGAAGGCCACGGGGAAGTGAATATTAAGCATTA | |
| | TCTAAACTGCAGTCACTGTGAGGTAGACGAATGTCACATGGACCCTGAAAGCCACAAG | |
| | GTCATCTGCTTCTGTGACCACGGGACGGTGCTGGCTGAGGATGGCGTCTCCTGCATTG | |
| | TGTCACCCACCCCGGAGCCACACCTGCCACTCTCGCTGATCCTCTCTGTGGTGACCTC | |
| | TGCCCTCGTGGCCGCCCTGGTCCTGGCTTTCTCCGGCATCATGATTGTGTACCGCCGG | |
| | AAGCACCAGGAGCTGCAAGCCATGCAGATGGAGCTGCAGAGCCCTGAGTACAAGCTGA | |
| | GCAAGCTCCGCACCTCGACCATCATGACCGACTACAACCCCAACTACTGCTTTGCTGG | |
| | CAAGACCTCCTCCATCAGTGACCTGAAGGAGGTGCCGCGGAAAAACATCACCCTCATT | |
| | CGGGGTCTGGGCCATGGCGCCTTTGGGGAGGTGTATGAAGGCCAGGTGTCCGGAATGC | |
| | CCAACGACCCAAGCCCCCTGCAAGTGGCTGTGAAGACGCTGCCTGAAGTGTGCTCTGA | |
| | ACAGGACGAACTGGATTTCCTCATGGAAGCCCTGATCATCAGCAAATTCAACCACCAG | |
| | AACATTGTTCGCTGCATTGGGGTGAGCCTGCAATCCCTGCCCCGGTTCATCCTGCTGG | |
| | AGCTCATGGCGGGGGGAGACCTCAAGTCCTTCCTCCGAGAGACCCGCCCTCGCCCGAG | |
| | CCAGCCCTCCTCCCTGGCCATGCTGGACCTTCTGCACGTGGCTCGGGACATTGCCTGT | |
| | GGCTGTCAGTATTTGGAGGAAAACCACTTCATCCACCGAGACATTGCTGCCAGAAACT | |
| | GCCTCTTGACCTGTCCAGGCCCTGGAAGAGTGGCCAAGATTGGAGACTTCGGGATGGC | |
| | CCGAGACATCTACAGGGCGAGCTACTATAGAAAGGGAGGCTGTGCCATGCTGCCAGTT | |
| | AAGTGGATGCCCCCAGAGGCCTTCATGGAAGGAATATTCACTTCTAAAACAGACACAT | |
| | GGTCCTTTGGAGTGCTGCTATGGGAAATCTTTTCTCTTGGATATATGCCATACCCCAG | |
| | CAAAAGCAACCAGGAAGTTCTGGAGTTTGTCACCAGTGGAGGCCGGATGGACCCACCC | |
| | AAGAACTGCCCTGGGCCTGTATACCGGATAATGACTCAGTGCTGGCAACATCAGCCTG | |
| | AAGACAGGCCCAACTTTGCCATCATTTTGGAGAGGATTGAATACTGCACCCAGGACCC | |
| | GGATGTAATCAACACCGCTTTGCCGATAGAATATGGTCCACTTGTGGAAGAGGAAGAG | |
| | AAAGTGCCTGTGAGGCCCAAGGACCCTGAGGGGGTTCCTCCTCTCCTGGTCTCTCAAC | |
| | AGGCAAAACGGGAGGAGGAGCGCAGCCCAGCTGCCCCACCACCTCTGCCTACCACCTC | |
| | CTCTGGCAAGGCTGCAAAGAAACCCACAGCTGCAGAGATCTCTGTTCGAGTCCCTAGA | |
| | GGGCCGGCCGTGGAAGGGGGACACGTGAATATGGCATTCTCTCAGTCCAACCCTCCTT | |
| | CGGAGTTGCACAAGGTCCACGGATCCAGAAACAAGCCCACCAGCTTGTGGAACCCAAC | |
| | GTACGGCTCCTGGTTTACAGAGAAACCCACCAAAAAGAATAATCCTATAGCAAAGAAG | |
| | GAGCCACACGACAGGGGTAACCTGGGGCTGGAGGGAAGCTGTACTGTCCCACCTAACG | |
| | TTGCAACTGGGAGACTTCCGGGGGCCTCACTGCTCCTAGAGCCCTCTTCGCTGACTGC | |
| | CAATATGAAGGAGGTACCTCTGTTCAGGCTACGTCACTTCCCTTGTGGGAATGTCAAT | |
| | TACGGCTACCAGCAACAGGGCTTGCCCTTAGAAGCCGCTACTGCCCCTGGAGCTGGTC | |
| | ATTACGAGGATACCATTCTGAAAAGCAAGAATAGCATGAACCAGCCTGGGCCCTGA | |
| ALK-NFIA | ATGTATTCTCCGCTCTGTCTCACCCAGGATGAATTTCATCCTTTCATCGAAGCACTTC | 15 |
| | TGCCCCACGTCCGAGCCTTTGCCTACACATGGTTCAACCTGCAGGCCCGAAAACGAAA | |
| | ATACTTCAAAAAACATGAAAAGCGTATGTCAAAAGAAGAAGAGAGAGCCGTGAAGGAT | |
| | GAATTGCTAAGTGAAAAACCAGAGGTCAAGCAGAAGTGGGCATCTCGACTTCTGGCAA | |
| | AGTTGCGGAAAGATATCCGACCCGAATATCGAGAGGATTTTGTTCTTACAGTTACAGG | |
| | GAAAAAACCTCCATGTTGTGTTCTTTCCAACCCAGACCAGAAAGGCAAGATGCGAAGA | |
| | ATTGACTGCCTCCGCCAGGCAGATAAAGTCTGGAGGTTGGACCTTGTTATGGTGATTT | |
| | TGTTTAAAGGTATTCCGCTGGAAAGTACTGATGGCGAGCGCCTTGTAAAGTCCCCACA | |
| | ATGCTCTAATCCAGGGCTCTGTGTCCAACCCCATCACATAGGGGTTTCTGTTAAGGAA | |
| | CTCGATTTATATTTGGCATACTTTGTGCATGCAGCAGGTCATAGCTCCTTGGAATCAC | |
| | CAACAAACATGCCTTCTCCTTCTCCTGATTATTTTACATGGAATCTCACCTGGATAAT | |
| | GAAAGACTCCTTCCCTTTCCTGTCTCATCGCAGCCGATATGGTCTGGAGTGCAGCTTT | |
| | GACTTCCCCTGTGAGCTGGAGTATTCCCCTCCACTGCATGACCTCAGGAACCAGAGCT | |
| | GGTCCTGGCGCCGCATCCCCTCCGAGGAGGCCTCCCAGATGGACTTGCTGGATGGGCC | |
| | TGGGGCAGAGCGTTCTAAGGAGATGCCCAGAGGCTCCTTTCTCCTTCTCAACACCTCA | |
| | GCTGACTCCAAGCACACCATCCTGAGTCCGTGGATGAGGAGCAGCAGTGAGCACTGCA | |
| | CACTGGCCGTCTCGGTGCACAGGCACCTGCAGCCCTCTGGAAGGTACATTGCCCAGCT | |
| | GCTGCCCCACAACGAGGCTGCAAGAGAGATCCTCCTGATGCCCACTCCAGGGAAGCAT | |
| | GGTTGGACAGTGCTCCAGGGAAGAATCGGGCGTCCAGACAACCCATTTCGAGTGGCCC | |
| | TGGAATACATCTCCAGTGGAAACCGCAGCTTGTCTGCAGTGGACTTCTTTGCCCTGAA | |
| | GAACTGCAGTGAAGGAACATCCCCAGGCTCCAAGATGGCCCTGCAGAGCTCCTTCACT | |
| | TGTTGGAATGGGACAGTCCTCCAGCTTGGGCAGGCCTGTGACTTCCACCAGGACTGTG | |
| | CCCAGGGAGAAGATGAGAGCCAGATGTGCCGGAAACTGCCTGTGGGTTTTTACTGCAA | |
| | CTTTGAAGATGGCTTCTGTGGCTGGACCCAAGGCACACTGTCACCCCACACTCCTCAA | |
| | TGGCAGGTCAGGACCCTAAAGGATGCCCGGTTCCAGGACCACCAAGACCATGCTCTAT | |
| | TGCTCAGTACCACTGATGTCCCCGCTTCTGAAAGTGCTACAGTGACCAGTGCTACGTT | |
| | TCCTGCACCGATCAAGAGCTCTCCATGTGAGCTCCGAATGTCCTGGCTCATTCGTGGA | |
| | GTCTTGAGGGGAAACGTGTCCTTGGTGCTAGTGGAGAACAAAACCGGGAAGGAGCAAG | |
| | GCAGGATGGTCTGGCATGTCGCCGCCTATGAAGGCTTGAGCCTGTGGCAGTGGATGGT | |
| | GTTGCCTCTCCTCGATGTGTCTGACAGGTTCTGGCTGCAGATGGTCGCATGGTGGGGA | |
| | CAAGGATCCAGAGCCATCGTGGCTTTTGACAATATCTCCATCAGCCTGGACTGCTACC | |
| | TCACCATTAGCGGAGAGGACAAGATCCTGCAGAATACAGCACCCAAATCAAGAAACCT | |
| | GTTTGAGAGAAACCCAAACAAGGAGCTGAAACCCGGGGAAAATTCACCAAGACAGACC | |
| | CCCATCTTTGACCCTACAGTTCATTGGCTGTTCACCACATGTGGGGCCAGCGGGCCCC | |
| | ATGGCCCCACCCAGGCACAGTGCAACAACGCCTACCAGAACTCCAACCTGAGCGTGGA | |
| | GGTGGGGAGCGAGGGCCCCCTGAAAGGCATCCAGATCTGGAAGGTGCCAGCCACCGAC | |
| | ACCTACAGCATCTCGGGCTACGGAGCTGCTGGCGGGAAAGGCGGGAAGAACACCATGA | |
| | TGCGGTCCCACGGCGTGTCTGTGCTGGGCATCTTCAACCTGGAGAAGGATGACATGCT | |
| | GTACATCCTGGTTGGGCAGCAGGGAGAGGACGCCTGCCCCAGTACAAACCAGTTAATC | |
| | CAGAAAGTCTGCATTGGAGAGAACAATGTGATAGAAGAAGAAATCCGTGTGAACAGAA | |
| | GCGTGCATGAGTGGGCAGGAGGCGGAGGAGGAGGGGGTGGAGCCACCTACGTATTTAA | |
| | GATGAAGGATGGAGTGCCGGTGCCCCTGATCATTGCAGCCGGAGGTGGTGGCAGGGCC | |
| | TACGGGGCCAAGACAGACACGTTCCACCCAGAGAGACTGGAGAATAACTCCTCGGTTC | |
| | TAGGGCTAAACGGCAATTCCGGAGCCGCAGGTGGTGGAGGTGGCTGGAATGATAACAC | |
| | TTCCTTGCTCTGGGCCGGAAAATCTTTGCAGGAGGGTGCCACCGGAGGACATTCCTGC | |
| | CCCCAGGCCATGAAGAAGTGGGGGTGGGAGACAAGAGGGGGTTTCGGAGGGGGTGGAG | |
| | GGGGGTGCTCCTCAGGTGGAGGAGGCGGAGGATATATAGGCGGCAATGCAGCCTCAAA | |
| | CAATGACCCCGAAATGGATGGGGAAGATGGGGTTTCCTTCATCAGTCCACTGGGCATC | |
| | CTGTACACCCCAGCTTTAAAAGTGATGGAAGGCCACGGGGAAGTGAATATTAAGCATT | |
| | ATCTAAACTGCAGTCACTGTGAGGTAGACGAATGTCACATGGACCCTGAAAGCCACAA | |
| | GGTCATCTGCTTCTGTGACCACGGGACGGTGCTGGCTGAGGATGGCGTCTCCTGCATT | |
| | GTGTCACCCACCCCGGAGCCACACCTGCCACTCTCGCTGATCCTCTCTGTGGTGACCT | |
| | CTGCCCTCGTGGCCGCCCTGGTCCTGGCTTTCTCCGGCATCATGATTGTGTACCGCCG | |
| | GAAGCACCAGGAGCTGCAAGCCATGCAGATGGAGCTGCAGAGCCCTGAGTACAAGCTG | |
| | AGCAAGCTCCGCACCTCGACCATCATGACCGACTACAACCCCAACTACTGCTTTGCTG | |
| | GCAAGACCTCCTCCATCAGTGACCTGAAGGAGGTGCCGCGGAAAAACATCACCCTCAT | |
| | TCGGGGTCTGGGCCATGGCGCCTTTGGGGAGGTGTATGAAGGCCAGGTGTCCGGAATG | |
| | CCCAACGACCCAAGCCCCCTGCAAGTGGCTGTGAAGACGCTGCCTGAAGTGTGCTCTG | |
| | AACAGGACGAACTGGATTTCCTCATGGAAGCCCTGATCATCAGCAAATTCAACCACCA | |
| | GAACATTGTTCGCTGCATTGGGGTGAGCCTGCAATCCCTGCCCCGGTTCATCCTGCTG | |
| | GAGCTCATGGCGGGGGGAGACCTCAAGTCCTTCCTCCGAGAGACCCGCCCTCGCCCGA | |
| | GCCAGCCCTCCTCCCTGGCCATGCTGGACCTTCTGCACGTGGCTCGGGACATTGCCTG | |
| | TGGCTGTCAGTATTTGGAGGAAAACCACTTCATCCACCGAGACATTGCTGCCAGAAAC | |
| | TGCCTCTTGACCTGTCCAGGCCCTGGAAGAGTGGCCAAGATTGGAGACTTCGGGATGG | |
| | CCCGAGACATCTACAGGGCGAGCTACTATAGAAAGGGAGGCTGTGCCATGCTGCCAGT | |
| | TAAGTGGATGCCCCCAGAGGCCTTCATGGAAGGAATATTCACTTCTAAAACAGACACA | |
| | TGGTCCTTTGGAGTGCTGCTATGGGAAATCTTTTCTCTTGGATATATGCCATACCCCA | |
| | GCAAAAGCAACCAGGAAGTTCTGGAGTTTGTCACCAGTGGAGGCCGGATGGACCCACC | |
| | CAAGAACTGCCCTGGGCCTGTATACCGGATAATGACTCAGTGCTGGCAACATCAGCCT | |
| | GAAGACAGGCCCAACTTTGCCATCATTTTGGAGAGGATTGAATACTGCACCCAGGACC | |
| | CGGATGTAATCAACACCGCTTTGCCGATAGAATATGGTCCACTTGTGGAAGAGGAAGA | |
| | GAAAGTGCCTGTGAGGCCCAAGGACCCTGAGGGGGTTCCTCCTCTCCTGGTCTCTCAA | |
| | CAGGCAAAACGGGAGGAGGAGCGCAGCCCAGCTGCCCCACCACCTCTGCCTACCACCT | |
| | CCTCTGGCAAGGCTGCAAAGAAACCCACAGCTGCAGAGATCTCTGTTCGAGTCCCTAG | |
| | AGGGCCGGCCGTGGAAGGGGGACACGTGAATATGGCATTCTCTCAGTCCAACCCTCCT | |
| | TCGGAGTTGCACAAGGTCCACGGATCCAGAAACAAGCCCACCAGCTTGTGGAACCCAA | |
| | CGTACGGCTCCTGGTTTACAGAGAAACCCACCAAAAAGAATAATCCTATAGCAAAGAA | |
| | GGAGCCACACGACAGGGGTAACCTGGGGCTGGAGGGAAGCTGTACTGTCCCACCTAAC | |
| | GTTGCAACTGGGAGACTTCCGGGGGCCTCACTGCTCCTAGAGCCCTCTTCGCTGACTG | |
| | CCAATATGAAGGAGGTACCTCTGTTCAGGCTACGTCACTTCCCTTGTGGGAATGTCAA | |
| | TTACGGCTACCAGCAACAGGGCTTGCCCTTAGAAGCCGCTACTGCCCCTGGAGCTGGT | |
| | CATTACGAGGATACCATTCTGAAAAGCAAGAATAGCATGAACCAGCCTGGGCCCTGA | |
| ALK- | ATGGAGGAGGAGGGTGGCAGCAGCGGCGGCGCCGCGGGGACCAGCGCGGACGGCGGCG | 16 |
| RPS6KA5 | ACGGAGGAGAGCAGCTCCTCACTGTCAAGCACGAGCTGCGGACTGACCATGCTCTATT | |
| | GCTCAGTACCACTGATGTCCCCGCTTCTGAAAGTGCTACAGTGACCAGTGCTACGTTT | |
| | CCTGCACCGATCAAGAGCTCTCCATGTGAGCTCCGAATGTCCTGGCTCATTCGTGGAG | |
| | TCTTGAGGGGAAACGTGTCCTTGGTGCTAGTGGAGAACAAAACCGGGAAGGAGCAAGG | |
| | CAGGATGGTCTGGCATGTCGCCGCCTATGAAGGCTTGAGCCTGTGGCAGTGGATGGTG | |
| | TTGCCTCTCCTCGATGTGTCTGACAGGTTCTGGCTGCAGATGGTCGCATGGTGGGGAC | |
| | AAGGATCCAGAGCCATCGTGGCTTTTGACAATATCTCCATCAGCCTGGACTGCTACCT | |
| | CACCATTAGCGGAGAGGACAAGATCCTGCAGAATACAGCACCCAAATCAAGAAACCTG | |
| | TTTGAGAGAAACCCAAACAAGGAGCTGAAACCCGGGGAAAATTCACCAAGACAGACCC | |
| | CCATCTTTGACCCTACAGTTCATTGGCTGTTCACCACATGTGGGGCCAGCGGGCCCCA | |
| | TGGCCCCACCCAGGCACAGTGCAACAACGCCTACCAGAACTCCAACCTGAGCGTGGAG | |
| | GTGGGGAGCGAGGGCCCCCTGAAAGGCATCCAGATCTGGAAGGTGCCAGCCACCGACA | |
| | CCTACAGCATCTCGGGCTACGGAGCTGCTGGCGGGAAAGGCGGGAAGAACACCATGAT | |
| | GCGGTCCCACGGCGTGTCTGTGCTGGGCATCTTCAACCTGGAGAAGGATGACATGCTG | |
| | TACATCCTGGTTGGGCAGCAGGGAGAGGACGCCTGCCCCAGTACAAACCAGTTAATCC | |
| | AGAAAGTCTGCATTGGAGAGAACAATGTGATAGAAGAAGAAATCCGTGTGAACAGAAG | |
| | CGTGCATGAGTGGGCAGGAGGCGGAGGAGGAGGGGGTGGAGCCACCTACGTATTTAAG | |
| | ATGAAGGATGGAGTGCCGGTGCCCCTGATCATTGCAGCCGGAGGTGGTGGCAGGGCCT | |
| | ACGGGGCCAAGACAGACACGTTCCACCCAGAGAGACTGGAGAATAACTCCTCGGTTCT | |
| | AGGGCTAAACGGCAATTCCGGAGCCGCAGGTGGTGGAGGTGGCTGGAATGATAACACT | |
| | TCCTTGCTCTGGGCCGGAAAATCTTTGCAGGAGGGTGCCACCGGAGGACATTCCTGCC | |
| | CCCAGGCCATGAAGAAGTGGGGGTGGGAGACAAGAGGGGGTTTCGGAGGGGGTGGAGG | |
| | GGGGTGCTCCTCAGGTGGAGGAGGCGGAGGATATATAGGCGGCAATGCAGCCTCAAAC | |
| | AATGACCCCGAAATGGATGGGGAAGATGGGGTTTCCTTCATCAGTCCACTGGGCATCC | |
| | TGTACACCCCAGCTTTAAAAGTGATGGAAGGCCACGGGGAAGTGAATATTAAGCATTA | |
| | TCTAAACTGCAGTCACTGTGAGGTAGACGAATGTCACATGGACCCTGAAAGCCACAAG | |
| | GTCATCTGCTTCTGTGACCACGGGACGGTGCTGGCTGAGGATGGCGTCTCCTGCATTG | |
| | TGTCACCCACCCCGGAGCCACACCTGCCACTCTCGCTGATCCTCTCTGTGGTGACCTC | |
| | TGCCCTCGTGGCCGCCCTGGTCCTGGCTTTCTCCGGCATCATGATTGTGTACCGCCGG | |
| | AAGCACCAGGAGCTGCAAGCCATGCAGATGGAGCTGCAGAGCCCTGAGTACAAGCTGA | |
| | GCAAGCTCCGCACCTCGACCATCATGACCGACTACAACCCCAACTACTGCTTTGCTGG | |
| | CAAGACCTCCTCCATCAGTGACCTGAAGGAGGTGCCGCGGAAAAACATCACCCTCATT | |
| | CGGGGTCTGGGCCATGGCGCCTTTGGGGAGGTGTATGAAGGCCAGGTGTCCGGAATGC | |
| | CCAACGACCCAAGCCCCCTGCAAGTGGCTGTGAAGACGCTGCCTGAAGTGTGCTCTGA | |
| | ACAGGACGAACTGGATTTCCTCATGGAAGCCCTGATCATCAGCAAATTCAACCACCAG | |
| | AACATTGTTCGCTGCATTGGGGTGAGCCTGCAATCCCTGCCCCGGTTCATCCTGCTGG | |
| | AGCTCATGGCGGGGGGAGACCTCAAGTCCTTCCTCCGAGAGACCCGCCCTCGCCCGAG | |
| | CCAGCCCTCCTCCCTGGCCATGCTGGACCTTCTGCACGTGGCTCGGGACATTGCCTGT | |
| | GGCTGTCAGTATTTGGAGGAAAACCACTTCATCCACCGAGACATTGCTGCCAGAAACT | |
| | GCCTCTTGACCTGTCCAGGCCCTGGAAGAGTGGCCAAGATTGGAGACTTCGGGATGGC | |
| | CCGAGACATCTACAGGGCGAGCTACTATAGAAAGGGAGGCTGTGCCATGCTGCCAGTT | |
| | AAGTGGATGCCCCCAGAGGCCTTCATGGAAGGAATATTCACTTCTAAAACAGACACAT | |
| | GGTCCTTTGGAGTGCTGCTATGGGAAATCTTTTCTCTTGGATATATGCCATACCCCAG | |
| | CAAAAGCAACCAGGAAGTTCTGGAGTTTGTCACCAGTGGAGGCCGGATGGACCCACCC | |
| | AAGAACTGCCCTGGGCCTGTATACCGGATAATGACTCAGTGCTGGCAACATCAGCCTG | |
| | AAGACAGGCCCAACTTTGCCATCATTTTGGAGAGGATTGAATACTGCACCCAGGACCC | |
| | GGATGTAATCAACACCGCTTTGCCGATAGAATATGGTCCACTTGTGGAAGAGGAAGAG | |
| | AAAGTGCCTGTGAGGCCCAAGGACCCTGAGGGGGTTCCTCCTCTCCTGGTCTCTCAAC | |
| | AGGCAAAACGGGAGGAGGAGCGCAGCCCAGCTGCCCCACCACCTCTGCCTACCACCTC | |
| | CTCTGGCAAGGCTGCAAAGAAACCCACAGCTGCAGAGATCTCTGTTCGAGTCCCTAGA | |
| | GGGCCGGCCGTGGAAGGGGGACACGTGAATATGGCATTCTCTCAGTCCAACCCTCCTT | |
| | CGGAGTTGCACAAGGTCCACGGATCCAGAAACAAGCCCACCAGCTTGTGGAACCCAAC | |
| | GTACGGCTCCTGGTTTACAGAGAAACCCACCAAAAAGAATAATCCTATAGCAAAGAAG | |
| | GAGCCACACGACAGGGGTAACCTGGGGCTGGAGGGAAGCTGTACTGTCCCACCTAACG | |
| | TTGCAACTGGGAGACTTCCGGGGGCCTCACTGCTCCTAGAGCCCTCTTCGCTGACTGC | |
| | CAATATGAAGGAGGTACCTCTGTTCAGGCTACGTCACTTCCCTTGTGGGAATGTCAAT | |
| | TACGGCTACCAGCAACAGGGCTTGCCCTTAGAAGCCGCTACTGCCCCTGGAGCTGGTC | |
| | ATTACGAGGATACCATTCTGAAAAGCAAGAATAGCATGAACCAGCCTGGGCCCTGA | |
| ALK-TG | ATGGCCCTGGTCCTGGAGATCTTCACCCTGCTGGCCTCCATCTGCTGGGTGTCGGCCA | 17 |
| | ATATCTTCGAGTACCAGGTGGATGCCCAGCCCCTTCGTCCCTGTGAGCTGCAGAGGGA | |
| | AACGGCCTTTCTGAAGCAAGCAGACTACGTGCCCCAGTGTGCAGAGGATGGCAGCTTC | |
| | CAGACTGTCCAGTGCCAGAACGACGGCCGCTCCTGCTGGTGTGTGGGTGCCAACGGCA | |
| | GTGAAGTGCTGGGCAGCAGGCAGCCAGGACGGCCTGTGGCTTGTCTGTCATTTTGTCA | |
| | GCTACAGAAACAGCAGATCTTACTGAGTGGCTACATTAACAGCACAGACACCTCCTAC | |
| | CTCCCTCAGTGTCAGGATTCAGGGGACTACGCGCCTGTTCAGTGTGATGTGCAGCAGG | |
| | TCCAGTGCTGGTGTGTGGACGCAGAGGGGATGGAGGTGTATGGGACCCGCCAGCTGGG | |
| | GAGGCCAAAGCGATGTCCAAGGAGCTGTGAAATAAGAAATCGTCGTCTTCTCCACGGG | |
| | GTGGGAGATAAGTCACCACCCCAGTGTTCTGCGGAGGGAGAGTTTATGCCTGTCCAGT | |
| | GCAAATTTGTCAACACCACAGACATGATGATTTTTGATCTGGTCCACAGCTACAACAG | |
| | GTTTCCAGATGCATTTGTGACCTTCAGTTCCTTCCAGAGGAGGTTCCCTGAGGTATCT | |
| | GGGTATTGCCACTGTGCTGACAGCCAAGGGCGGGAACTGGCTGAGACAGGTTTGGAGT | |
| | TGTTACTGGATGAAATTTATGACACCATTTTTGCTGGCCTGGACCTTCCTTCCACCTT | |
| | CACTGAAACCACCCTGTACCGGATACTGCAGAGACGGTTCCTCGCAGTTCAATCAGTC | |
| | ATCTCTGGCAGATTCCGATGCCCCACAAAATGTGAAGTGGAGCGGTTTACAGCAACCA | |
| | GCTTTGGTCACCCCTATGTTCCAAGCTGCCGCCGAAATGGCGACTATCAGGCGGTGCA | |
| | GTGCCAGACGGAAGGGCCCTGCTGGTGTGTGGACGCCCAGGGGAAGGAAATGCATGGA | |
| | ACCCGGCAGCAAGGGGAGCCGCCATCTTGTGCTGAAGGCCAATCTTGTGCCTCCGAAA | |
| | GGCAGCAGGCCTTGTCCAGACTCTACTTTGGGACCTCAGGCTACTTCAGCCAGCACGA | |
| | CCTGTTCTCTTCCCCAGAGAAAAGATGGGCCTCTCCAAGAGTAGCCAGATTTGCCACA | |
| | TCCTGCCCACCCACGATCAAGGAGCTCTTTGTGGACTCTGGGCTTCTCCGCCCAATGG | |
| | TGGAGGGACAGAGCCAACAGTTTTCTGTCTCAGAAAATCTTCTCAAAGAAGCCATCCG | |
| | AGCAATTTTTCCCTCCCGAGGGCTGGCTCGTCTTGCCCTTCAGTTTACCACCAACCCA | |
| | AAGAGACTCCAGCAAAACCTTTTTGGAGGGAAATTTTTGGTGAATGTTGGCCAGTTTA | |
| | ACTTGTCTGGAGCCCTTGGCACAAGAGGCACATTTAACTTCAGTCAATTTTTCCAGCA | |
| | ACTTGGTCTTGCAAGCTTCTTGAATGGAGGGAGACAAGAAGATTTGGCCAAGCCACTC | |
| | TCTGTGGGATTAGATTCAAATTCTTCCACAGGAACCCCTGAAGCTGCTAAGAAGGATG | |
| | GTACTATGAATAAGCCAACTGTGGGCAGCTTTGGCTTTGAAATTAACCTACAAGAGAA | |
| | CCAAAATGCCCTCAAATTCCTTGCTTCTCTCCTGGAGCTTCCAGAATTCCTTCTCTTC | |
| | TTGCAACATGCTATCTCTGTGCCAGAAGATGTGGCAAGAGATTTAGGTGATGTGATGG | |
| | AAACGGTACTCAGCTCCCAGACCTGTGAGCAGACACCTGAAAGGCTATTTGTCCCATC | |
| | ATGCACGACAGAAGGAAGCTATGAGGATGTCCAATGCTTTTCCGGAGAGTGCTGGTGT | |
| | GTGAATTCCTGGGGCAAAGAGCTTCCAGGCTCAAGAGTCAGAGGTGGACAGCCAAGGT | |
| | GCCCCACAGACTGTGAAAAGCAAAGGGCTCGCATGCAAAGCCTCATGGGCAGCCAGCC | |
| | TGCTGGCTCCACCTTGTTTGTCCCTGCTTGTACTAGTGAGGGACATTTCCTGCCTGTC | |
| | CAGTGCTTCAACTCAGAGTGCTACTGTGTTGATGCTGAGGGTCAGGCCATTCCTGGAA | |
| | CTCGAAGTGCAATAGGGAAGCCCAAGAAATGCCCCACGCCCTGTCAATTACAGTCTGA | |
| | GCAAGCTTTCCTCAGGACGGTGCAGGCCCTGCTCTCTAACTCCAGCATGCTACCCACC | |
| | CTTTCCGACACCTACATCCCACAGTGCAGCACCGATGGGCAGTGGAGACAAGTGCAAT | |
| | GCAATGGGCCTCCTGAGCAGGTCTTCGAGTTGTACCAACGATGGGAGGCTCAGAACAA | |
| | GGGCCAGGATCTGACGCCTGCCAAGCTGCTAGTGAAGATCATGAGCTACAGAGAAGCA | |
| | GCTTCCGGAAACTTCAGTCTCTTTATTCAAAGTCTGTATGAGGCTGGCCAGCAAGATG | |
| | TCTTCCCGGTGCTGTCACAATACCCTTCTCTGCAAGATGTCCCACTAGCAGCACTGGA | |
| | AGGGAAACGGCCCCAGCCCAGGGAGAATATCCTCCTGGAGCCCTACCTCTTCTGGCAG | |
| | ATCTTAAATGGCCAACTCAGCCAATACCCGGGGTCCTACTCAGACTTCAGCACTCCTT | |
| | TGGCACATTTTGATCTTCGGAACTGCTGGTGTGTGGATGAGGCTGGCCAAGAACTGGA | |
| | AGGAATGCGGTCTGAGCCAAGCAAGCTCCCAACATTGTCACCCACCCCGGAGCCACAC | |
| | CTGCCACTCTCGCTGATCCTCTCTGTGGTGACCTCTGCCCTCGTGGCCGCCCTGGTCC | |
| | TGGCTTTCTCCGGCATCATGATTGTGTACCGCCGGAAGCACCAGGAGCTGCAAGCCAT | |
| | GCAGATGGAGCTGCAGAGCCCTGAGTACAAGCTGAGCAAGCTCCGCACCTCGACCATC | |
| | ATGACCGACTACAACCCCAACTACTGCTTTGCTGGCAAGACCTCCTCCATCAGTGACC | |
| | TGAAGGAGGTGCCGCGGAAAAACATCACCCTCATTCGGGGTCTGGGCCATGGCGCCTT | |
| | TGGGGAGGTGTATGAAGGCCAGGTGTCCGGAATGCCCAACGACCCAAGCCCCCTGCAA | |
| | GTGGCTGTGAAGACGCTGCCTGAAGTGTGCTCTGAACAGGACGAACTGGATTTCCTCA | |
| | TGGAAGCCCTGATCATCAGCAAATTCAACCACCAGAACATTGTTCGCTGCATTGGGGT | |
| | GAGCCTGCAATCCCTGCCCCGGTTCATCCTGCTGGAGCTCATGGCGGGGGGAGACCTC | |
| | AAGTCCTTCCTCCGAGAGACCCGCCCTCGCCCGAGCCAGCCCTCCTCCCTGGCCATGC | |
| | TGGACCTTCTGCACGTGGCTCGGGACATTGCCTGTGGCTGTCAGTATTTGGAGGAAAA | |
| | CCACTTCATCCACCGAGACATTGCTGCCAGAAACTGCCTCTTGACCTGTCCAGGCCCT | |
| | GGAAGAGTGGCCAAGATTGGAGACTTCGGGATGGCCCGAGACATCTACAGGGCGAGCT | |
| | ACTATAGAAAGGGAGGCTGTGCCATGCTGCCAGTTAAGTGGATGCCCCCAGAGGCCTT | |
| | CATGGAAGGAATATTCACTTCTAAAACAGACACATGGTCCTTTGGAGTGCTGCTATGG | |
| | GAAATCTTTTCTCTTGGATATATGCCATACCCCAGCAAAAGCAACCAGGAAGTTCTGG | |
| | AGTTTGTCACCAGTGGAGGCCGGATGGACCCACCCAAGAACTGCCCTGGGCCTGTATA | |
| | CCGGATAATGACTCAGTGCTGGCAACATCAGCCTGAAGACAGGCCCAACTTTGCCATC | |
| | ATTTTGGAGAGGATTGAATACTGCACCCAGGACCCGGATGTAATCAACACCGCTTTGC | |
| | CGATAGAATATGGTCCACTTGTGGAAGAGGAAGAGAAAGTGCCTGTGAGGCCCAAGGA | |
| | CCCTGAGGGGGTTCCTCCTCTCCTGGTCTCTCAACAGGCAAAACGGGAGGAGGAGCGC | |
| | AGCCCAGCTGCCCCACCACCTCTGCCTACCACCTCCTCTGGCAAGGCTGCAAAGAAAC | |
| | CCACAGCTGCAGAGATCTCTGTTCGAGTCCCTAGAGGGCCGGCCGTGGAAGGGGGACA | |
| | CGTGAATATGGCATTCTCTCAGTCCAACCCTCCTTCGGAGTTGCACAAGGTCCACGGA | |
| | TCCAGAAACAAGCCCACCAGCTTGTGGAACCCAACGTACGGCTCCTGGTTTACAGAGA | |
| | AACCCACCAAAAAGAATAATCCTATAGCAAAGAAGGAGCCACACGACAGGGGTAACCT | |
| | GGGGCTGGAGGGAAGCTGTACTGTCCCACCTAACGTTGCAACTGGGAGACTTCCGGGG | |
| | GCCTCACTGCTCCTAGAGCCCTCTTCGCTGACTGCCAATATGAAGGAGGTACCTCTGT | |
| | TCAGGCTACGTCACTTCCCTTGTGGGAATGTCAATTACGGCTACCAGCAACAGGGCTT | |
| | GCCCTTAGAAGCCGCTACTGCCCCTGGAGCTGGTCATTACGAGGATACCATTCTGAAA | |
| | AGCAAGAATAGCATGAACCAGCCTGGGCCCTGA | |
| ALK- | ATGGGGACTCCTGCTTCTGGAAGGAAAAGAACACCTGTGAAAGACCGATTTTCTGCAG | 18 |
| LRRFIP2 | AAGATGAAGCTTTGAGTAACATTGCCAGAGAGGCAGAGGCAAGGCTGGCAGCAAAACG | |
| | GGCTGCCCGGGCAGAAGCAAGAGATATACGCATGAGAGAACTGGAACGACAACAAAAA | |
| | GAGTACTCTCTTCATTCCTTTGATCGGAAGTGGGGACAGATTCAGAAGTGGCTGGAAG | |
| | ATTCGGAAAGGGCCAGGTATTCCCACCGGTCCAGTCACCATCGTCCTTATCTGGGAGT | |
| | TGAGGATGCATTGTCCATTCGAAGTGTTGGCAGTCACAGGTATGATATGTTCAAGGAT | |
| | AGATCATCAAGACTTTCATCATTAAATCATTCTTACAGTCACTCTCATGGAATGAAGA | |
| | AGAGGTCTTCTGATTCTCATAAAGACCTACTGAGTGGCCTCTACTTTGACCAGAGAAA | |
| | CTATAGCAGTCTTAGACATAGCAAACCCACCTCTGCCTACTACACTCGGCAGTCTTCT | |
| | TCCCTGTACAGTGACCCTCTGGCAACATATAAGAGTGACAGGGCCTCTCCTACTGCAA | |
| | ATTCTGGTCTGCTGAGAAGTGCCAGTCTGGCATCATTGTACAATGGTGGATTATATAA | |
| | CCCTTATGGTCCTCGAACTCCATCTGAATGCAGTTATTATTCATCAAGAATAAGTTCA | |
| | GCCCGAAGCAGTCCAGGGTTTACCAACGATGACACTGCAAGCATTGTGTCTTCTGATC | |
| | GTGCCAGTCGTGGACGAAGGGAGAGTGTGGTATCTGCCGCTGATTATTTCAGTCGCTC | |
| | CAATCGTAGGGGAAGTGTTGTCTCTGAGGTGGATGATATCAGTATCCCAGATTTGTCC | |
| | AGCTTGGATGAAAAATCTGACAAACAGTATGCTGAAAATTATACAAGACCTTCATCTC | |
| | GAAATTCTGCCTCAGCAACAACCCCTCTAAGTGGAAACTCATCCAGACGAGGAAGTGG | |
| | GGACACCAGCAGCTTAATAGATCCAGACACTTCATTAAGTGAATTGCGGGATATCTAT | |
| | GACCTTAAGGACCAGATACAGGATGTAGAAGGGAGATACATGCAGGGGCTTAAAGAAC | |
| | TAAAGGAATCTTTGTCTGAAGTGGAAGAAAAATACAAGAAAGCCATGGTTTCCAATGC | |
| | ACAGTTAGACAATGAGAAGAACAATTTGATCTACCAAGTAGACACACTCAAGGATGTT | |
| | ATTGAAGAGCAGGAGGAACAGATGGCAGAATTTTATAGAGAAAATGAAGAAAAATCAA | |
| | AGGAGTTAGAAAGGCAGAAACATATGTGTAGTGTGCTGCAGCATAAGATGGAAGAACT | |
| | TAAAGAAGGCCTGCGGCAAAGAGATGAGCTTATTGAGGAGAAGCAGCGCATGCAGCAG | |
| | AAAATAGACACCATGACAAAAGAGGTGTTTGACCTCCAGGAGACACTTCTTTGGAAAG | |
| | ATAAAAAAATTGGGGCCCTAGAGAAACAGAAAGAATACATTGCCTGCCTTAGGAATGA | |
| | GCGAGATATGCTCAGAGAGGAGCTGGCTGACCTGCAGGAGACAGTGAAGACGGGAGAG | |
| | AAACATGGCTTAGTTATAATCCCCGATGGCACTCCCAATGGTGATGTCAGTCATGAAC | |
| | CAGTGGCTGGAGCCATCACTGTTGTGTCTCAGGAAGCTGCTCAGGTCTTGGAGTCAGC | |
| | AGGAGAAGGGCCATTAGATGTAAGGCTACGAAAACTTGCTGGAGAGAAGGAAGAACTA | |
| | CTGTCACAGATTAGAAAACTGAAGCTTCAGTTAGAGGAGGAACGACAGAAATGCTCCA | |
| | GGAATGATGGCACAGTGGGTGACCTGGCAGGACTGCAGAATGGCTCAGACTTGCAGTT | |
| | CATCGAAATGCAGATGTACCGCCGGAAGCACCAGGAGCTGCAAGCCATGCAGATGGAG | |
| | CTGCAGAGCCCTGAGTACAAGCTGAGCAAGCTCCGCACCTCGACCATCATGACCGACT | |
| | ACAACCCCAACTACTGCTTTGCTGGCAAGACCTCCTCCATCAGTGACCTGAAGGAGGT | |
| | GCCGCGGAAAAACATCACCCTCATTCGGGGTCTGGGCCATGGCGCCTTTGGGGAGGTG | |
| | TATGAAGGCCAGGTGTCCGGAATGCCCAACGACCCAAGCCCCCTGCAAGTGGCTGTGA | |
| | AGACGCTGCCTGAAGTGTGCTCTGAACAGGACGAACTGGATTTCCTCATGGAAGCCCT | |
| | GATCATCAGCAAATTCAACCACCAGAACATTGTTCGCTGCATTGGGGTGAGCCTGCAA | |
| | TCCCTGCCCCGGTTCATCCTGCTGGAGCTCATGGCGGGGGGAGACCTCAAGTCCTTCC | |
| | TCCGAGAGACCCGCCCTCGCCCGAGCCAGCCCTCCTCCCTGGCCATGCTGGACCTTCT | |
| | GCACGTGGCTCGGGACATTGCCTGTGGCTGTCAGTATTTGGAGGAAAACCACTTCATC | |
| | CACCGAGACATTGCTGCCAGAAACTGCCTCTTGACCTGTCCAGGCCCTGGAAGAGTGG | |
| | CCAAGATTGGAGACTTCGGGATGGCCCGAGACATCTACAGGGCGAGCTACTATAGAAA | |
| | GGGAGGCTGTGCCATGCTGCCAGTTAAGTGGATGCCCCCAGAGGCCTTCATGGAAGGA | |
| | ATATTCACTTCTAAAACAGACACATGGTCCTTTGGAGTGCTGCTATGGGAAATCTTTT | |
| | CTCTTGGATATATGCCATACCCCAGCAAAAGCAACCAGGAAGTTCTGGAGTTTGTCAC | |
| | CAGTGGAGGCCGGATGGACCCACCCAAGAACTGCCCTGGGCCTGTATACCGGATAATG | |
| | ACTCAGTGCTGGCAACATCAGCCTGAAGACAGGCCCAACTTTGCCATCATTTTGGAGA | |
| | GGATTGAATACTGCACCCAGGACCCGGATGTAATCAACACCGCTTTGCCGATAGAATA | |
| | TGGTCCACTTGTGGAAGAGGAAGAGAAAGTGCCTGTGAGGCCCAAGGACCCTGAGGGG | |
| | GTTCCTCCTCTCCTGGTCTCTCAACAGGCAAAACGGGAGGAGGAGCGCAGCCCAGCTG | |
| | CCCCACCACCTCTGCCTACCACCTCCTCTGGCAAGGCTGCAAAGAAACCCACAGCTGC | |
| | AGAGATCTCTGTTCGAGTCCCTAGAGGGCCGGCCGTGGAAGGGGGACACGTGAATATG | |
| | GCATTCTCTCAGTCCAACCCTCCTTCGGAGTTGCACAAGGTCCACGGATCCAGAAACA | |
| | AGCCCACCAGCTTGTGGAACCCAACGTACGGCTCCTGGTTTACAGAGAAACCCACCAA | |
| | AAAGAATAATCCTATAGCAAAGAAGGAGCCACACGACAGGGGTAACCTGGGGCTGGAG | |
| | GGAAGCTGTACTGTCCCACCTAACGTTGCAACTGGGAGACTTCCGGGGGCCTCACTGC | |
| | TCCTAGAGCCCTCTTCGCTGACTGCCAATATGAAGGAGGTACCTCTGTTCAGGCTACG | |
| | TCACTTCCCTTGTGGGAATGTCAATTACGGCTACCAGCAACAGGGCTTGCCCTTAGAA | |
| | GCCGCTACTGCCCCTGGAGCTGGTCATTACGAGGATACCATTCTGAAAAGCAAGAATA | |
| | GCATGAACCAGCCTGGGCCCTGA | |
| ALK- | ATGGCGGTGGCCGAGCTGTACACGCAGTACAACAGGGTCTGGATTCCCGATCCTGAAG | 19 |
| MYO5C | AAGTTTGGAAGTCTGCTGAAATAGCCAAGGACTACAGAGTTGGTGACAAGGTCCTGCG | |
| | ACTCCTGCTGGAGGATGGAACGGAGCTGGATTATTCTGTCAATCCAGAATCTCTGCCT | |
| | CCACTTCGGAATCCTGACATCCTCGTGGGCGAGAATGACCTCACGGCTCTCAGCTATC | |
| | TTCACGAGCCCGCGGTGCTCCACAACCTCAGAATCCGCTTTGCAGAATCCAAACTCAT | |
| | TTACACCTACAGTGGAATCATTTTGGTGGCCATGAATCCTTACAAGCAGTTGCCAATA | |
| | TACGGAGATGCCATCATCCACGCCTACAGCGGGCAGAACATGGGCGATATGGACCCAC | |
| | ACATATTTGCCGTGGCAGAAGAGGCATACAAGCAGATGGCCAGAAACAACAGAAACCA | |
| | GTCCATAATTGTAAGTGGGGAGTCAGGTGCTGGAAAGACAGTGTCGGCTCGCTATGCC | |
| | ATGAGGTACTTTGCCACCGTCAGCAAATCGGGCAGCAACGCTCACGTGGAAGACAAGG | |
| | TCCTGGCATCCAATCCCATCACCGAGGCCGTTGGAAATGCCAAGACCACCCGCAATGA | |
| | CAATAGTAGTCGGTTTGGGAAATACACAGAAATCAGTTTTGATGAACAAAATCAAATT | |
| | ATAGGAGCCAACATGAGCACTTACCTCCTGGAGAAATCCAGAGTTGTCTTTCAATCGG | |
| | AAAATGAACGAAATTACCACATTTTCTATCAGCTTTGTGCATCTGCACAGCAGTCGGA | |
| | ATTTAAACATCTTAAATTGGGGAGTGCCGAAGAATTTAATTATACAAGAATGGGAGGC | |
| | AATACTGTCATTGAGGGTGTGAATGATCGAGCTGAAATGGTAGAGACTCAAAAGACCT | |
| | TCACGCTTCTGGGTTTCAAGGAGGATTTTCAGATGGACGTTTTTAAAATCCTGGCAGC | |
| | CATCCTACATCTGGGCAATGTGCAGATCACCGCGGTGGGCAACGAGAGGTCCTCAGTT | |
| | AGTGAGGATGACAGTCACCTGAAGGTGTTCTGTGAGCTCCTGGGCCTGGAGAGTGGCA | |
| | GAGTTGCTCAGTGGCTGTGCAATCGCAAAATCGTCACAAGCTCTGAGACGGTGGTAAA | |
| | ACCCATGACCAGGCCTCAGGCTGTCAACGCCAGGGATGCACTGGCCAAAAAGATCTAT | |
| | GCTCACCTGTTCGACTTCATTGTGGAGAGAATTAACCAAGCGTTGCAGTTTTCAGGCA | |
| | AGCAGCACACTTTTATTGGTGTTTTGGACATTTATGGTTTTGAAACCTTTGATGTGAA | |
| | CAGCTTTGAACAATTTTGCATCAATTACGCTAATGAAAAACTGCAACAACAGTTTAAC | |
| | ATGCATGTCTTCAAACTGGAACAAGAAGAATACATGAAGGAAGATATACCTTGGACGC | |
| | TGATAGATTTTTATGACAATCAACCAGTTATTGACCTGATTGAAGCAAAAATGGGAAT | |
| | TCTGGAGTTACTGGATGAAGAATGTTTGTTACCACATGGAACTGATGAAAACTGGCTT | |
| | CAAAAGCTGTATAATAATTTTGTCAACAGGAACCCTTTGTTTGAAAAGCCTAGAATGT | |
| | CAAACACATCCTTTGTCATCCAGCACTTTGCTGATAAGGTAGAGTATAAATGTGAAGG | |
| | TTTCCTGGAGAAAAACAGAGACACCGTCTATGACATGCTGGTTGAAATCCTGAGAGCA | |
| | AGCAAGTTTCATCTCTGTGCCAACTTTTTTCAAGAAAATCCAACTCCTCCTTCTCCTT | |
| | TTGGTTCAATGATTACAGTTAAATCTGCAAAGCAAGTCATCAAGCCAAACAGCAAGCA | |
| | TTTCCGGACCACAGTTGGGAGCAAGTTCCGCAGCTCTCTGTACTTGCTCATGGAGACC | |
| | CTCAATGCGACGACGCCCCACTACGTTCGATGCATCAAGCCAAATGATGAGAAGTTAC | |
| | CCTTTGAATTTGACTCCAAAAGAATTGTTCAGCAGCTGCGAGCCTGCGGCGTTTTAGA | |
| | AACGATTCGCATTAGTGCACAGAGCTACCCTTCCAGGTGGACATACATCGAGTTCTAC | |
| | AGTCGCTACGGCATTCTCATGACCAAGCAAGAGCTTTCCTTCAGCGATAAAAAGGAGG | |
| | TGTGCAAGGTGGTTTTACACAGACTCATCCAGGATTCTAATCAGTACCAGTTTGGTAA | |
| | AACCAAAATTTTCTTCAGAGCAGGACAAGTGGCTTATTTAGAGAAACTTCGATTGGAT | |
| | AAACTGAGGCAGAGTTGTGTTATGGTACAAAAGCACATGCGTGGCTGGCTCCAGAGGA | |
| | AAAAATTCCTCCGAGAGAGACGAGCCGCCCTGATAATCCAGCAGTACTTCCGGGGTCA | |
| | GCAAACTGTGAGGAAAGCTATTACTGCAGTGGCCTTAAAAGAAGCTTGGGCAGCCATA | |
| | ATCATTCAGAAGCACTGCCGCGGGTATCTTGTTCGCAGCCTGTATCAGTTGATTCGCA | |
| | TGGCCACCATCACAATGCAGGCCTACAGCCGAGGATTCCTGGCAAGGAGGAGGTATCG | |
| | AAAGATGCTGGAGGAACATAAGGCTGTGATCCTACAGAAATACGCACGGGCGTGGCTG | |
| | GCCAGACGCAGATTCCAGAGTATCCGACGATTCGTGCTTAATATTCAGCTTACTTACA | |
| | GGGTCCAGCGTTTGCAGAAAAAGTTGGAAGATCAGAACAAAGAAAACCATGGGCTGGT | |
| | GGAGAAGCTGACTAGCCTGGCTGCTCTTCGAGCTGGGGATGTGGAAAAGATTCAGAAG | |
| | CTGGAAGCAGAACTAGAAAAAGCAGCCACTCACAGGCGAAATTACGAGGAGAAGGGGA | |
| | AGAGATACAGGGATGCTGTGGAAGAGAAATTGGCAAAGCTTCAGAAGCATAATTCAGA | |
| | ACTGGAAACACAGAAAGAACAAATACAGCTGAAGCTTCAAGAGAAGACTGAAGAGTTA | |
| | AAAGAAAAAATGGACAACCTCACCAAGCAGCTCTTTGATGATGTACAAAAGGAAGAAC | |
| | GGCAAAGAATGCTTCTTGAAAAAAGTTTTGAACTGAAAACACAAGACTATGAGAAGCA | |
| | GATTCAGTCTTTGAAAGAAGAAATTAAAGCTCTCAAGGATGAGAAGATGCAACTCCAA | |
| | CACCTGGTGGAGGGGGAGCACGTCACTTCTGATGGCTTGAAGGCGGAAGTGGCCCGCC | |
| | TGAGCAAGCAGGTCAAGACAATCTCTGAGTTCGAAAAAGAGATAGAACTACTTCAGGC | |
| | ACAGAAGATAGATGTGGAGAAACATGTGCAGTCACAAAAACGGGAAATGAGAGAAAAG | |
| | ATGTCAGAGATCACCAAACAACTTCTCGAAAGCTATGACATTGAAGATGTAAGAAGCA | |
| | GGCTCTCTGTGGAAGATCTGGAACATTTAAATGAGGATGGAGAACTTTGGTTTGCTTA | |
| | TGAAGGACTAAAGAAAGCAACACGTGTTTTGGAGAGCCATTTCCAGTCTCAGAAGGAT | |
| | TGCTATGAAAAGGAGATTGAAGCTTTGAACTTCAAAGTGGTGCATCTCAGTCAAGAAA | |
| | TCAACCACCTGCAGAAGTTATTCAGAGAAGAAAATGACATCAATGAAAGCATCCGTCA | |
| | TGAAGTTACCAGGCTAACATCAGAGAACATGATGATCCCAGACTTTAAACAGCAAATT | |
| | TCAGAATTGGAGAAACAGAAGCAAGATCTTGAAATCCGCCTGAATGAACAAGCTGAGA | |
| | AAATGAAAGTGTACCGCCGGAAGCACCAGGAGCTGCAAGCCATGCAGATGGAGCTGCA | |
| | GAGCCCTGAGTACAAGCTGAGCAAGCTCCGCACCTCGACCATCATGACCGACTACAAC | |
| | CCCAACTACTGCTTTGCTGGCAAGACCTCCTCCATCAGTGACCTGAAGGAGGTGCCGC | |
| | GGAAAAACATCACCCTCATTCGGGGTCTGGGCCATGGCGCCTTTGGGGAGGTGTATGA | |
| | AGGCCAGGTGTCCGGAATGCCCAACGACCCAAGCCCCCTGCAAGTGGCTGTGAAGACG | |
| | CTGCCTGAAGTGTGCTCTGAACAGGACGAACTGGATTTCCTCATGGAAGCCCTGATCA | |
| | TCAGCAAATTCAACCACCAGAACATTGTTCGCTGCATTGGGGTGAGCCTGCAATCCCT | |
| | GCCCCGGTTCATCCTGCTGGAGCTCATGGCGGGGGGAGACCTCAAGTCCTTCCTCCGA | |
| | GAGACCCGCCCTCGCCCGAGCCAGCCCTCCTCCCTGGCCATGCTGGACCTTCTGCACG | |
| | TGGCTCGGGACATTGCCTGTGGCTGTCAGTATTTGGAGGAAAACCACTTCATCCACCG | |
| | AGACATTGCTGCCAGAAACTGCCTCTTGACCTGTCCAGGCCCTGGAAGAGTGGCCAAG | |
| | ATTGGAGACTTCGGGATGGCCCGAGACATCTACAGGGCGAGCTACTATAGAAAGGGAG | |
| | GCTGTGCCATGCTGCCAGTTAAGTGGATGCCCCCAGAGGCCTTCATGGAAGGAATATT | |
| | CACTTCTAAAACAGACACATGGTCCTTTGGAGTGCTGCTATGGGAAATCTTTTCTCTT | |
| | GGATATATGCCATACCCCAGCAAAAGCAACCAGGAAGTTCTGGAGTTTGTCACCAGTG | |
| | GAGGCCGGATGGACCCACCCAAGAACTGCCCTGGGCCTGTATACCGGATAATGACTCA | |
| | GTGCTGGCAACATCAGCCTGAAGACAGGCCCAACTTTGCCATCATTTTGGAGAGGATT | |
| | GAATACTGCACCCAGGACCCGGATGTAATCAACACCGCTTTGCCGATAGAATATGGTC | |
| | CACTTGTGGAAGAGGAAGAGAAAGTGCCTGTGAGGCCCAAGGACCCTGAGGGGGTTCC | |
| | TCCTCTCCTGGTCTCTCAACAGGCAAAACGGGAGGAGGAGCGCAGCCCAGCTGCCCCA | |
| | CCACCTCTGCCTACCACCTCCTCTGGCAAGGCTGCAAAGAAACCCACAGCTGCAGAGA | |
| | TCTCTGTTCGAGTCCCTAGAGGGCCGGCCGTGGAAGGGGGACACGTGAATATGGCATT | |
| | CTCTCAGTCCAACCCTCCTTCGGAGTTGCACAAGGTCCACGGATCCAGAAACAAGCCC | |
| | ACCAGCTTGTGGAACCCAACGTACGGCTCCTGGTTTACAGAGAAACCCACCAAAAAGA | |
| | ATAATCCTATAGCAAAGAAGGAGCCACACGACAGGGGTAACCTGGGGCTGGAGGGAAG | |
| | CTGTACTGTCCCACCTAACGTTGCAACTGGGAGACTTCCGGGGGCCTCACTGCTCCTA | |
| | GAGCCCTCTTCGCTGACTGCCAATATGAAGGAGGTACCTCTGTTCAGGCTACGTCACT | |
| | TCCCTTGTGGGAATGTCAATTACGGCTACCAGCAACAGGGCTTGCCCTTAGAAGCCGC | |
| | TACTGCCCCTGGAGCTGGTCATTACGAGGATACCATTCTGAAAAGCAAGAATAGCATG | |
| | AACCAGCCTGGGCCCTGA | |
| ALK- | ATGAACTACCAGCAGCAGCTGGCCAACTCGGCTGCCATCCGGGCCGAGATCCAGCGCT | 20 |
| AGAP1 | TCGAGTCGGTCCACCCCAACATCTACTCCATCTACGAGCTGCTGGAGCGCGTGGAGGA | |
| | GCCGGTGCTGCAGAACCAGATCCGGGAGCACGTCATCGCCATCGAAGATGCCTTCGTG | |
| | AACAGCCAGGAATGGACGCTGAGTCGATCTGTCCCGGAGCTCAAAGTGGGAATTGTGG | |
| | GTAACTTGGCCAGCGGCAAGTCTGCCCTGGTGCACCGGTACCTGACGGGCACATATGT | |
| | CCAGGAGGAGTCTCCGGAAGGTGGCAGGTTCAAGAAAGAGATTGTCGTTGATGGACAG | |
| | AGCTATCTGCTGCTGATCAGAGATGAAGGGGGCCCCCCGGAGGCGCAGTTTGCCATGT | |
| | GGGTGGACGCTGTTATATTTGTCTTCAGCTTGGAGGATGAAATAAGTTTCCAGACCGT | |
| | TTACCACTACTACAGTCGAATGGCCAACTATCGGAACACGAGCGAGATTCCTCTGGTT | |
| | CTGGTGGGAACCCAGGATGCCATAAGTTCTGCTAACCCGAGGGTCATCGATGACGCCA | |
| | GGGCGAGGAAGCTCTCCAACGACCTGAAACGGTGCACGTACTACGAGACGTGTGCTAC | |
| | ATACGGGCTGAATGTGGAGAGGGTCTTCCAGGACGTGATGGAAGGCCACGGGGAAGTG | |
| | AATATTAAGCATTATCTAAACTGCAGTCACTGTGAGGTAGACGAATGTCACATGGACC | |
| | CTGAAAGCCACAAGGTCATCTGCTTCTGTGACCACGGGACGGTGCTGGCTGAGGATGG | |
| | CGTCTCCTGCATTGTGTCACCCACCCCGGAGCCACACCTGCCACTCTCGCTGATCCTC | |
| | TCTGTGGTGACCTCTGCCCTCGTGGCCGCCCTGGTCCTGGCTTTCTCCGGCATCATGA | |
| | TTGTGTACCGCCGGAAGCACCAGGAGCTGCAAGCCATGCAGATGGAGCTGCAGAGCCC | |
| | TGAGTACAAGCTGAGCAAGCTCCGCACCTCGACCATCATGACCGACTACAACCCCAAC | |
| | TACTGCTTTGCTGGCAAGACCTCCTCCATCAGTGACCTGAAGGAGGTGCCGCGGAAAA | |
| | ACATCACCCTCATTCGGGGTCTGGGCCATGGCGCCTTTGGGGAGGTGTATGAAGGCCA | |
| | GGTGTCCGGAATGCCCAACGACCCAAGCCCCCTGCAAGTGGCTGTGAAGACGCTGCCT | |
| | GAAGTGTGCTCTGAACAGGACGAACTGGATTTCCTCATGGAAGCCCTGATCATCAGCA | |
| | AATTCAACCACCAGAACATTGTTCGCTGCATTGGGGTGAGCCTGCAATCCCTGCCCCG | |
| | GTTCATCCTGCTGGAGCTCATGGCGGGGGGAGACCTCAAGTCCTTCCTCCGAGAGACC | |
| | CGCCCTCGCCCGAGCCAGCCCTCCTCCCTGGCCATGCTGGACCTTCTGCACGTGGCTC | |
| | GGGACATTGCCTGTGGCTGTCAGTATTTGGAGGAAAACCACTTCATCCACCGAGACAT | |
| | TGCTGCCAGAAACTGCCTCTTGACCTGTCCAGGCCCTGGAAGAGTGGCCAAGATTGGA | |
| | GACTTCGGGATGGCCCGAGACATCTACAGGGCGAGCTACTATAGAAAGGGAGGCTGTG | |
| | CCATGCTGCCAGTTAAGTGGATGCCCCCAGAGGCCTTCATGGAAGGAATATTCACTTC | |
| | TAAAACAGACACATGGTCCTTTGGAGTGCTGCTATGGGAAATCTTTTCTCTTGGATAT | |
| | ATGCCATACCCCAGCAAAAGCAACCAGGAAGTTCTGGAGTTTGTCACCAGTGGAGGCC | |
| | GGATGGACCCACCCAAGAACTGCCCTGGGCCTGTATACCGGATAATGACTCAGTGCTG | |
| | GCAACATCAGCCTGAAGACAGGCCCAACTTTGCCATCATTTTGGAGAGGATTGAATAC | |
| | TGCACCCAGGACCCGGATGTAATCAACACCGCTTTGCCGATAGAATATGGTCCACTTG | |
| | TGGAAGAGGAAGAGAAAGTGCCTGTGAGGCCCAAGGACCCTGAGGGGGTTCCTCCTCT | |
| | CCTGGTCTCTCAACAGGCAAAACGGGAGGAGGAGCGCAGCCCAGCTGCCCCACCACCT | |
| | CTGCCTACCACCTCCTCTGGCAAGGCTGCAAAGAAACCCACAGCTGCAGAGATCTCTG | |
| | TTCGAGTCCCTAGAGGGCCGGCCGTGGAAGGGGGACACGTGAATATGGCATTCTCTCA | |
| | GTCCAACCCTCCTTCGGAGTTGCACAAGGTCCACGGATCCAGAAACAAGCCCACCAGC | |
| | TTGTGGAACCCAACGTACGGCTCCTGGTTTACAGAGAAACCCACCAAAAAGAATAATC | |
| | CTATAGCAAAGAAGGAGCCACACGACAGGGGTAACCTGGGGCTGGAGGGAAGCTGTAC | |
| | TGTCCCACCTAACGTTGCAACTGGGAGACTTCCGGGGGCCTCACTGCTCCTAGAGCCC | |
| | TCTTCGCTGACTGCCAATATGAAGGAGGTACCTCTGTTCAGGCTACGTCACTTCCCTT | |
| | GTGGGAATGTCAATTACGGCTACCAGCAACAGGGCTTGCCCTTAGAAGCCGCTACTGC | |
| | CCCTGGAGCTGGTCATTACGAGGATACCATTCTGAAAAGCAAGAATAGCATGAACCAG | |
| | CCTGGGCCCTGA | |
| ALK- | ATGGGAGCCATCGGGCTCCTGTGGCTCCTGCCGCTGCTGCTTTCCACGGCAGCTGTGG | 21 |
| MED13L | GCTCCGGGATGGGGACCGGCCAGCGCGCGGGCTCCCCAGCTGCGGGGCCGCCGCTGCA | |
| | GCCCCGGGAGCCACTCAGCTACTCGCGCCTGCAGAGGAAGAGTCTGGCAGTTGACTTC | |
| | GTGGTGCCCTCGCTCTTCCGTGTCTACGCCCGGGACCTACTGCTGCCACCATCCTCCT | |
| | CGGAGCTGAAGGCTGGCAGGCCCGAGGCCCGCGGCTCGCTAGCTCTGGACTGCGCCCC | |
| | GCTGCTCAGGTTGCTGGGGCCGGCGCCGGGGGTCTCCTGGACCGCCGGTTCACCAGCC | |
| | CCGGCAGAGGCCCGGACGCTGTCCAGGGTGCTGAAGGGCGGCTCCGTGCGCAAGCTCC | |
| | GGCGTGCCAAGCAGTTGGTGCTGGAGCTGGGCGAGGAGGCGATCTTGGAGGGTTGCGT | |
| | CGGGCCCCCCGGGGAGGCGGCTGTGGGGCTGCTCCAGTTCAATCTCAGCGAGCTGTTC | |
| | AGTTGGTGGATTCGCCAAGGCGAAGGGCGACTGAGGATCCGCCTGATGCCCGAGAAGA | |
| | AGGCGTCGGAAGTGGGCAGAGAGGGAAGGCTGTCCGCGGCAATTCGCGCCTCCCAGCC | |
| | CCGCCTTCTCTTCCAGATCTTCGGGACTGTACTGGTAAGTCCTTATGGCTTAAATGGG | |
| | ACGCTAACAGGCCAAGCATACAAGATGTCAGACCCAGCCACTCGTAAGTTGATTGAGG | |
| | AATGGCAGTATTTCTACCCGATGGTGCTAAAAAAGAAAGAAGAATCGAAAGAGGAAGA | |
| | CGAGTTGGGATATGATGATGATTTCCCTGTGGCAGTTGAAGTAATTGTTGGTGGTGTT | |
| | CGGATGGTTTACCCTTCAGCATTTGTTTTGATCTCTCAGAATGACATCCCGGTTCCTC | |
| | AGAGTGTTGCCAGTGCTGGAGGCCACATTGCAGTTGGGCAGCAAGGGCTTGGTAGTGT | |
| | GAAGGACCCAAGTAACTGTGGGATGCCTCTGACCCCTCCCACCTCTCCAGAACAGGCT | |
| | ATCCTAGGTGAGAGTGGAGGTATGCAGAGTGCTGCCAGTCACCTGGTTTCCCAAGATG | |
| | GAGGGATGATAACGATGCACAGTCCAAAGAGATCGGGGAAGATTCCTCCAAAACTCCA | |
| | CAATCATATGGTCCATCGAGTCTGGAAGGAATGCATCCTCAACAGAACCCAGTCCAAG | |
| | AGGAGCCAAATGTCAACTCCAACTCTTGAAGAAGAGCCTGCTAGCAATCCTGCTACTT | |
| | GGGATTTTGTGGATCCAACCCAAAGAGTCAGCTGTTCTTGTTCCAGGCATAAGCTTTT | |
| | AAAACGTTGTGCAGTCGGGCCCAATCGACCTCCCACAGTATCTCAACCAGGGTTCAGT | |
| | GCAGGACCATCATCATCTTCATCTTTACCACCTCCTGCTTCTTCTAAGCACAAAACAG | |
| | CAGAAAGACAGGAAAAAGGAGACAAGCTGCAAAAGAGACCCTTAATACCATTTCACCA | |
| | TAGGCCCTCTGTGGCCGAAGAATTATGCATGGAGCAAGATACACCAGGACAGAAACTA | |
| | GGGTTGGCAGGGATAGACTCCTCCTTAGAGGTGTCTAGCAGTAGGAAATATGATAAGC | |
| | AAATGGCCGTGCCTTCCAGAAATACAAGCAAGCAAATGAATCTGAATCCTATGGATTC | |
| | ACCTCATTCCCCTATATCCCCTCTGCCACCAACACTCAGCCCTCAGCCACGAGGTCAG | |
| | GAAACAGAGAGTTTGGACCCACCATCGGTCCCTGTGAATCCAGCCCTTTATGGAAATG | |
| | GACTAGAACTCCAGCAGTTGTCTACTCTGGATGACAGAACTGTCCTCGTAGGCCAAAG | |
| | ACTGCCTCTCATGGCAGAGGTCAGCGAGACAGCCTTATATTGTGGGATTAGGCCCTCG | |
| | AACCCGGAGTCATCAGAAAAGTGGTGGCATAGTTATCGTCTCCCACCCAGTGATGATG | |
| | CTGAGTTCAGGCCTCCAGAGCTCCAGGGTGAGAGATGTGATGCCAAAATGGAGGTAAA | |
| | CTCAGAGAGCACTGCATTGCAAAGACTCTTAGCACAACCTAACAAACGGTTTAAAATC | |
| | TGGCAAGACAAACAGCCCCAGTTGCAGCCACTCCACTTCCTTGACCCATTGCCTCTAT | |
| | CACAACAACCTGGAGACAGTTTGGGAGAAGTGAATGACCCATATACCTTTGAAGATGG | |
| | TGACATAAAATACATCTTTACAGCCAACAAGAAATGCAAACAAGGGACGGAGAAAGAT | |
| | TCCCTGAAAAAGAATAAGTCAGAGGATGGATTTGGTACCAAGGATGTCACTACACCAG | |
| | GTCATTCCACGCCGGTGCCTGATGGGAAAAATGCCATGTCTATTTTCAGTTCTGCTAC | |
| | TAAAACAGATGTCCGGCAGGATAATGCTGCTGGCAGAGCTGGCTCCAGTAGCCTTACA | |
| | CAGGTAACAGATTTGGCACCTTCCCTGCATGACTTAGACAACATCTTTGATAATTCTG | |
| | ATGACGACGAACTTGGGGCTGTATCACCTGCTCTGCGCTCATCAAAAATGCCTGCAGT | |
| | TGGGACAGAAGACCGACCTCTTGGGAAGGATGGAAGAGCTGCTGTTCCTTATCCACCA | |
| | ACAGTTGCAGACTTGCAAAGGATGTTTCCCACTCCACCATCTTTGGAACAGCATCCTG | |
| | CATTTTCTCCTGTGATGAATTATAAAGATGGGATCAGCTCAGAGACAGTGACAGCATT | |
| | AGGCATGATGGAGAGCCCTATGGTCAGTATGGTTTCAACACAACTCACAGAATTCAAA | |
| | ATGGAAGTGGAAGATGGATTAGGAAGTCCCAAGCCCGAGGAAATTAAGGACTTTTCAT | |
| | ATGTGCACAAAGTTCCATCCTTTCAACCTTTTGTGGGATCCTCCATGTTTGCTCCACT | |
| | GAAGATGTTGCCGAGCCATTGTTTGCTACCTCTGAAGATACCTGATGCCTGTCTGTTT | |
| | CGGCCTTCATGGGCAATTCCTCCTAAAATTGAACAACTGCCCATGCCCCCTGCAGCCA | |
| | CTTTCATTAGAGATGGCTACAATAACGTGCCTAGTGTTGGGAGCCTAGCAGATCCAGA | |
| | CTATCTGAACACACCACAGATGAACACACCCGTGACGTTGAACAGCGCTGCCCCAGCC | |
| | AGCAATAGTGGGGCAGGAGTCCTACCATCTCCAGCAACCCCTCGCTTCTCTGTCCCCA | |
| | CACCACGAACCCCCAGGACCCCAAGAACTCCCAGAGGTGGGGGCACTGCCAGTGGTCA | |
| | AGGGTCTGTTAAGTATGATAGCACCGATCAAGGATCACCAGCCTCCACCCCCTCTACT | |
| | ACACGGCCCCTCAACTCTGTGGAGCCCGCCACCATGCAGCCAATTCCCGAAGCCCACA | |
| | GCCTCTATGTTACCCTGATTCTCTCCGATTCCGTGATGAATATCTTTAAAGACAGAAA | |
| | CTTTGACAGCTGTTGCATCTGTGCCTGCAACATGAACATCAAAGGGGCGGATGTCGGG | |
| | CTTTACATCCCCGATTCTTCCAATGAGGACCAGTACCGCTGTACCTGTGGGTTTAGTG | |
| | CGATTATGAACCGCAAACTTGGCTACAATTCAGGACTCTTCCTTGAAGATGAGTTGGA | |
| | TATTTTTGGGAAGAATTCTGATATTGGTCAGGCTGCAGAGAGGCGCTTAATGATGTGT | |
| | CAGTCCACCTTCCTTCCTCAGGTGGAAGGAACCAAAAAACCCCAGGAGCCACCCATAA | |
| | GCCTTCTCCTCCTCCTCCAGAATCAACACACACAACCTTTTGCTTCACTGAATTTCCT | |
| | GGACTACATTTCCTCTAACAATCGCCAAACTCTTCCCTGTGTAAGCTGGAGTTATGAC | |
| | CGGGTGCAAGCAGATAATAATGATTACTGGACGGAATGCTTTAATGCGTTGGAGCAGG | |
| | GGCGGCAGTATGTGGATAACCCCACTGGTGGAAAAGTGGACGAAGCTCTGGTGAGAAG | |
| | TGCCACTGTGCACTCTTGGCCTCACAGCAATGTGCTGGACATCAGCATGCTCTCCTCC | |
| | CAGGATGTGGTTCGTATGCTGTTGTCCCTGCAGCCCTTTCTCCAAGATGCCATCCAAA | |
| | AGAAGCGCACGGGCAGGACCTGGGAGAACATCCAGCATGTGCAGGGACCACTCACTTG | |
| | GCAGCAGTTCCATAAAATGGCAGGACGGGGAACCTACGGTTCGGAAGAATCTCCTGAG | |
| | CCGTTGCCCATCCCCACTCTGCTGGTAGGCTATGACAAGGATTTCCTCACCATCTCGC | |
| | CATTCTCCTTGCCGTTTTGGGAGAGGCTCTTGTTGGACCCATATGGGGGCCACCGTGA | |
| | TGTTGCCTATATTGTGGTGTGTCCAGAAAATGAGGCCTTGCTCGAAGGAGCCAAAACT | |
| | TTCTTCAGGGACTTGAGTGCTGTATACGAGATGTGTAGGCTTGGGCAGCACAAGCCCA | |
| | TCTGCAAAGTGCTACGTGACGGGATCATGCGCGTGGGAAAAACTGTGGCACAGAAGCT | |
| | GACAGATGAGCTTGTGAGTGAGTGGTTTAACCAGCCTTGGAGCGGCGAGGAGAATGAC | |
| | AATCATTCCAGACTCAAACTTTATGCGCAAGTTTGCCGCCATCACCTAGCACCTTATT | |
| | TAGCCACTCTGCAGCTTGATAGCAGCCTATTGATACCACCTAAATACCAGACCCCACC | |
| | AGCAGCAGCACAGGGACAAGCTACGCCAGGGAATGCTGGGCCCTTAGCTCCAAATGGA | |
| | TCAGCAGCTCCCCCAGCTGGCAGTGCATTTAATCCCACCTCGAATAGTAGTTCTACAA | |
| | ATCCTGCAGCAAGTAGTTCTGCATCTGGTTCCTCTGTGCCACCGGTCTCATCGTCTGC | |
| | CTCTGCTCCTGGTATTAGCCAGATAAGCACTACCTCTTCTTCAGGATTCAGTGGTAGT | |
| | GTTGGAGGGCAGAACCCCAGCACTGGGGGCATTTCTGCGGATAGAACGCAAGGGAACA | |
| | TAGGCTGTGGTGGAGACACTGACCCTGGGCAGAGCTCTTCTCAGCCCTCACAGGATGG | |
| | ACAAGAGAGTGTTACAGAAAGGGAGAGAATAGGAATTCCCACGGAGCCTGACTCTGCA | |
| | GACAGCCATGCCCACCCTCCAGCTGTTGTCATTTACATGGTGGACCCGTTCACGTATG | |
| | CTGCAGAGGAGGACTCCACTTCTGGGAACTTTTGGCTGTTGAGCTTGATGCGCTGCTA | |
| | CACAGAAATGCTGGATAATTTACCTGAGCATATGAGAAATTCTTTCATTCTCCAGATT | |
| | GTGCCTTGCCAGTACATGCTGCAGACAATGAAGGATGAGCAAGTTTTCTACATTCAAT | |
| | ACTTGAAGTCCATGGCATTTTCAGTGTACTGCCAGTGCAGGCGACCACTGCCTACACA | |
| | GATCCACATTAAATCCCTCACGGGATTTGGGCCTGCAGCCAGCATTGAGATGACCCTC | |
| | AAGAACCCTGAGCGGCCCAGCCCAATCCAGCTTTACTCCCCTCCCTTTATATTGGCCC | |
| | CAATCAAAGACAAGCAGACAGAGCTGGGAGAGACGTTTGGTGAGGCGAGCCAGAAATA | |
| | CAATGTGCTCTTCGTGGGCTATTGTCTGTCTCACGACCAGCGCTGGCTTTTGGCTTCC | |
| | TGCACTGACCTCCATGGGGAATTATTAGAGACCTGCGTTGTAAATATTGCTTTACCAA | |
| | ACAGGTCACGGAGGAGTAAAGTATCTGCACGTAAAATTGGACTACAGAAGTTATGGGA | |
| | GTGGTGCATAGGGATTGTCCAAATGACATCTCTACCCTGGAGAGTTGTAATCGGGCGA | |
| | CTTGGGCGTCTTGGCCATGGGGAGCTTAAAGATTGGAGTATCCTCCTTGGAGAATGTT | |
| | CACTACAGACAATCAGCAAAAAGCTCAAGGATGTGTGCCGGATGTGTGGAATCTCTGC | |
| | CGCAGACTCTCCTTCTATCCTTAGTGCCTGCCTGGTTGCCATGGAGCCCCAGGGGTCC | |
| | TTTGTAGTGATGCCAGATGCTGTCACAATGGGCTCTGTTTTTGGCCGAAGTACTGCAC | |
| | TGAACATGCAGTCATCTCAGCTCAACACCCCTCAAGATGCTTCTTGTACACACATCTT | |
| | GGTGTTCCCAACATCATCAACCATCCAGGTGGCTCCAGCCAACTACCCCAATGAAGAT | |
| | GGGTTTAGCCCCAACAATGATGATATGTTTGTTGACCTTCCATTCCCAGATGATATGG | |
| | ACAATGATATTGGCATATTAATGACTGGGAACCTCCATTCCTCTCCCAACTCTTCCCC | |
| | AGTACCCTCCCCAGGCTCTCCTTCTGGAATTGGTGTGGGCTCTCACTTCCAGCATAGT | |
| | CGGAGCCAGGGTGAGCGTCTTCTTTCTAGAGAAGCACCAGAGGAGCTAAAGCAGCAGC | |
| | CCCTGGCCCTTGGGTATTTTGTATCAACTGCCAAAGCTGAGAATCTTCCCCAGTGGTT | |
| | TTGGTCATCGTGTCCCCAGGCTCAAAACCAGTGCCCTCTCTTCTTAAAGGCTTCGCTG | |
| | CATCACCACATTTCAGTAGCACAGACAGACGAACTTCTGCCTGCCAGGAATTCTCAGC | |
| | GGGTTCCACACCCTCTTGACTCCAAAACCACGTCGGATGTTTTAAGGTTTGTTTTGGA | |
| | GCAGTACAACGCTCTGTCCTGGCTCACGTGCAATCCGGCCACCCAGGACCGTACTTCC | |
| | TGCCTTCCCGTCCACTTTGTGGTGCTCACTCAGTTGTACAATGCCATCATGAATATAC | |
| | TTTAA | |
| ALK-MTBP | ATGGGAGCCATCGGGCTCCTGTGGCTCCTGCCGCTGCTGCTTTCCACGGCAGCTGTGG | 22 |
| | GCTCCGGGATGGGGACCGGCCAGCGCGCGGGCTCCCCAGCTGCGGGGCCGCCGCTGCA | |
| | GCCCCGGGAGCCACTCAGCTACTCGCGCCTGCAGAGGAAGAGTCTGGCAGTTGACTTC | |
| | GTGGTGCCCTCGCTCTTCCGTGTCTACGCCCGGGACCTACTGCTGCCACCATCCTCCT | |
| | CGGAGCTGAAGGCTGGCAGGCCCGAGGCCCGCGGCTCGCTAGCTCTGGACTGCGCCCC | |
| | GCTGCTCAGGTTGCTGGGGCCGGCGCCGGGGGTCTCCTGGACCGCCGGTTCACCAGCC | |
| | CCGGCAGAGGCCCGGACGCTGTCCAGGGTGCTGAAGGGCGGCTCCGTGCGCAAGCTCC | |
| | GGCGTGCCAAGCAGTTGGTGCTGGAGCTGGGCGAGGAGGCGATCTTGGAGGGTTGCGT | |
| | CGGGCCCCCCGGGGAGGCGGCTGTGGGGCTGCTCCAGTTCAATCTCAGCGAGCTGTTC | |
| | AGTTGGTGGATTCGCCAAGGCGAAGGGCGACTGAGGATCCGCCTGATGCCCGAGAAGA | |
| | AGGCGTCGGAAGTGGGCAGAGAGGGAAGGCTGTCCGCGGCAATTCGCGCCTCCCAGCC | |
| | CCGCCTTCTCTTCCAGATCTTCGGGACTGGTCATAGCTCCTTGGAATCACCAACAAAC | |
| | ATGCCTTCTCCTTCTCCTGATTATTTTACATGGAATCTCACCTGGATAATGAAAGACT | |
| | CCTTCCCTTTCCTGTCTCATCGCAGCCGATATGGTCTGGAGTGCAGCTTTGACTTCCC | |
| | CTGTGAGCTGGAGTATTCCCCTCCACTGCATGACCTCAGGAACCAGAGCTGGTCCTGG | |
| | CGCCGCATCCCCTCCGAGGAGGCCTCCCAGATGGACTTGCTGGATGGGCCTGGGGCAG | |
| | AGCGTTCTAAGGAGATGCCCAGAGGCTCCTTTCTCCTTCTCAACACCTCAGCTGACTC | |
| | CAAGCACACCATCCTGAGTCCGTGGATGAGGAGCAGCAGTGAGCACTGCACACTGGCC | |
| | GTCTCGGTGCACAGGCACCTGCAGCCCTCTGGAAGGTACATTGCCCAGCTGCTGCCCC | |
| | ACAACGAGGCTGCAAGAGAGATCCTCCTGATGCCCACTCCAGGGAAGCATGGTTGGAC | |
| | AGTGCTCCAGGGAAGAATCGGGCGTCCAGACAACCCATTTCGAGTGGCCCTGGAATAC | |
| | ATCTCCAGTGGAAACCGCAGCTTGTCTGCAGTGGACTTCTTTGCCCTGAAGAACTGCA | |
| | GTGAAGGAACATCCCCAGGCTCCAAGATGGCCCTGCAGAGCTCCTTCACTTGTTGGAA | |
| | TGGGACAGTCCTCCAGCTTGGGCAGGCCTGTGACTTCCACCAGGACTGTGCCCAGGGA | |
| | GAAGATGAGAGCCAGATGTGCCGGAAACTGCCTGTGGGTTTTTACTGCAACTTTGAAG | |
| | ATGGCTTCTGTGGCTGGACCCAAGGCACACTGTCACCCCACACTCCTCAATGGCAGGT | |
| | CAGGACCCTAAAGGATGCCCGGTTCCAGGACCACCAAGACCATGCTCTATTGCTCAGT | |
| | ACCACTGATGTCCCCGCTTCTGAAAGTGCTACAGTGACCAGTGCTACGTTTCCTGCAC | |
| | CGATCAAGAGCTCTCCATGTGAGCTCCGAATGTCCTGGCTCATTCGTGGAGTCTTGAG | |
| | GGGAAACGTGTCCTTGGTGCTAGTGGAGAACAAAACCGGGAAGGAGCAAGGCAGGATG | |
| | GTCTGGCATGTCGCCGCCTATGAAGGCTTGAGCCTGTGGCAGTGGATGGTGTTGCCTC | |
| | TCCTCGATGTGTCTGACAGGTTCTGGCTGCAGATGGTCGCATGGTGGGGACAAGGATC | |
| | CAGAGCCATCGTGGCTTTTGACAATATCTCCATCAGCCTGGACTGCTACCTCACCATT | |
| | AGCGGAGAGGACAAGATCCTGCAGAATACAGCACCCAAATCAAGAAACCTGTTTGAGA | |
| | GAAACCCAAACAAGGAGCTGAAACCCGGGGAAAATTCACCAAGACAGACCCCCATCTT | |
| | TGACCCTACAGTTCATTGGCTGTTCACCACATGTGGGGCCAGCGGGCCCCATGGCCCC | |
| | ACCCAGGCACAGTGCAACAACGCCTACCAGAACTCCAACCTGAGCGTGGAGGTGGGGA | |
| | GCGAGGGCCCCCTGAAAGGCATCCAGATCTGGAAGGTGCCAGCCACCGACACCTACAG | |
| | CATCTCGGGCTACGGAGCTGCTGGCGGGAAAGGCGGGAAGAACACCATGATGCGGTCC | |
| | CACGGCGTGTCTGTGCTGGGCATCTTCAACCTGGAGAAGGATGACATGCTGTACATCC | |
| | TGGTTGGGCAGCAGGGAGAGGACGCCTGCCCCAGTACAAACCAGTTAATCCAGAAAGT | |
| | CTGCATTGGAGAGAACAATGTGATAGAAGAAGAAATCCGTGTGAACAGAAGCGTGCAT | |
| | GAGTGGGCAGGAGGCGGAGGAGGAGGGGGTGGAGCCACCTACGTATTTAAGATGAAGG | |
| | ATGGAGTGCCGGTGCCCCTGATCATTGCAGCCGGAGGTGGTGGCAGGGCCTACGGGGC | |
| | CAAGACAGACACGTTCCACCCAGAGAGACTGGAGAATAACTCCTCGGTTCTAGGGCTA | |
| | AACGGCAATTCCGGAGCCGCAGGTGGTGGAGGTGGCTGGAATGATAACACTTCCTTGC | |
| | TCTGGGCCGGAAAATCTTTGCAGGAGGGTGCCACCGGAGGACATTCCTGCCCCCAGGC | |
| | CATGAAGAAGTGGGGGTGGGAGACAAGAGGGGGTTTCGGAGGGGGTGGAGGGGGGTGC | |
| | TCCTCAGGTGGAGGAGGCGGAGGATATATAGGCGGCAATGCAGCCTCAAACAATGACC | |
| | CCGAAATGGATGGGGAAGATGGGGTTTCCTTCATCAGTCCACTGGGCATCCTGTACAC | |
| | CCCAGCTTTAAAAGTTCCAGATGTTGAAGTGAAAGGAGAGTGTTCTAGCTATTATCTC | |
| | TTGTTACAAGGTAATGGCAATAGAAGATGTAAAGCCACATTGATTCACTCAGCCAACC | |
| | AGATCAATGGCTCATTTGCACTCAATTTAATTCATGGAAAGATGAAAACAAAGACAGA | |
| | AGAAGCCAAATTGAGTTTTCCTTTTGACTTATTATCACTTCCACATTTTTCTGGGGAG | |
| | CAGATTGTACAGAGAGAGAAACAGTTAGCTAATGTTCAAGTTTTAGCTTTGGAAGAAT | |
| | GCCTAAAAAGACGAAAGTTGGCAAAGCAGCCTGAAACAGTTTCTGTTGCTGAACTCAA | |
| | AAGTCTGTTAGTACTCACAAGGAAACACTTTTTAGATTATTTTGATGCTGTGATTCCT | |
| | AAAATGATTCTAAGAAAGATGGACAAAATTAAAACCTTCAATATATTAAATGATTTTA | |
| | GTCCAGTGGAACCTAATTCCTCAAGTCTAATGGAAACCAATCCTCTGGAATGGCCAGA | |
| | AAGGCATGTTCTTCAAAATTTGGAAACTTTTGAAAAAACTAAACAAAAAATGAGAACT | |
| | GGTTCATTACCTCATTCATCTGAACAGTTGCTGGGCCACAAAGAGGGTCCTCGGGACT | |
| | CAATCACATTGTTGGATGCTAAAGAATTGCTGAAGTACTTTACCTCAGATGGATTACC | |
| | CATTGGAGATCTTCAACCTTTACCGATTCAAAAGGGGGAAAAGACTTTTGTTTTGACA | |
| | CCAGAACTTAGTCCTGGGAAACTTCAGGTCTTACCTTTTGAGAAAGCCTCAGTATGTC | |
| | ATTATCATGGAATTGAATATTGCTTGGATGACCGAAAAGCTTTGGAAAGAGATGGAGG | |
| | ATTTTCTGAACTTCAGTCTCGTCTTATTCGTTATGAAACTCAAACTACCTGCACCAGA | |
| | GAAAGTTTTCCAGTACCTACTGTGTTGAGCCCTCTTCCATCTCCTGTAGTTTCGTCAG | |
| | ATCCTGGAAGTGTCCCTGACGGAGAAGTTTTACAAAATGAACTTCGAACTGAAGTATC | |
| | CCGATTGAAACGGAGATCTAAAGATCTGAATTGCCTTTATCCCAGAAAAAGACTTGTG | |
| | AAATCTGAAAGTTCAGAGTCTCTTCTTTCTCAGACAACTGGTAATAGTAATCACTATC | |
| | ATCATCATGTGACATCCAGAAAGCCACAAACAGAACGGTCCTTACCAGTGACTTGTCC | |
| | ATTGGTTCCAATTCCTAGCTGTGAAACTCCAAAACTTGCTACAAAGACCAGTTCAGGT | |
| | CAAAAAAGTATGCATGAATCAAAAACATCAAGGCAAATTAAGGAATCAAGATCACAGA | |
| | AACACACACGGATACTGAAAGAAGTAGTTACTGAAACCCTGAAGAAACACAGTATTAC | |
| | CGAGACTCATGAATGTTTCACTGCATGCAGCCAGCGTCTCTTTGAAATCTCTAAGTTC | |
| | TATCTAAAGGATCTTAAAACTTCAAGGGGTCTATTTGAAGAAATGAAGAAAACAGCAA | |
| | ACAACAATGCTGTACAGGTGATTGACTGGGTATTAGAAAAGACAAGCAAGAAATGA | |
| ALK- | ATGGGAGCCATCGGGCTCCTGTGGCTCCTGCCGCTGCTGCTTTCCACGGCAGCTGTGG | 24 |
| SLC30A6 | GCTCCGGGATGGGGACCGGCCAGCGCGCGGGCTCCCCAGCTGCGGGGCCGCCGCTGCA | |
| | GCCCCGGGAGCCACTCAGCTACTCGCGCCTGCAGAGGAAGAGTCTGGCAGTTGACTTC | |
| | GTGGTGCCCTCGCTCTTCCGTGTCTACGCCCGGGACCTACTGCTGCCACCATCCTCCT | |
| | CGGAGCTGAAGGCTGGCAGGCCCGAGGCCCGCGGCTCGCTAGCTCTGGACTGCGCCCC | |
| | GCTGCTCAGGTTGCTGGGGCCGGCGCCGGGGGTCTCCTGGACCGCCGGTTCACCAGCC | |
| | CCGGCAGAGGCCCGGACGCTGTCCAGGGTGCTGAAGGGCGGCTCCGTGCGCAAGCTCC | |
| | GGCGTGCCAAGCAGTTGGTGCTGGAGCTGGGCGAGGAGGCGATCTTGGAGGGTTGCGT | |
| | CGGGCCCCCCGGGGAGGCGGCTGTGGGGCTGCTCCAGTTCAATCTCAGCGAGCTGTTC | |
| | AGTTGGTGGATTCGCCAAGGCGAAGGGCGACTGAGGATCCGCCTGATGCCCGAGAAGA | |
| | AGGCGTCGGAAGTGGGCAGAGAGGGAAGGCTGTCCGCGGCAATTCGCGCCTCCCAGCC | |
| | CCGCCTTCTCTTCCAGATCTTCGGGACTGGTCATAGCTCCTTGGAATCACCAACAAAC | |
| | ATGCCTTCTCCTTCTCCTGATTATTTTACATGGAATCTCACCTGGATAATGAAAGACT | |
| | CCTTCCCTTTCCTGTCTCATCGCAGCCGATATGGTCTGGAGTGCAGCTTTGACTTCCC | |
| | CTGTGAGCTGGAGTATTCCCCTCCACTGCATGACCTCAGGAACCAGAGCTGGTCCTGG | |
| | CGCCGCATCCCCTCCGAGGAGGCCTCCCAGATGGACTTGCTGGATGGGCCTGGGGCAG | |
| | AGCGTTCTAAGGAGATGCCCAGAGGCTCCTTTCTCCTTCTCAACACCTCAGCTGACTC | |
| | CAAGCACACCATCCTGAGTCCGTGGATGAGGAGCAGCAGTGAGCACTGCACACTGGCC | |
| | GTCTCGGTGCACAGGCACCTGCAGCCCTCTGGAAGGTACATTGCCCAGCTGCTGCCCC | |
| | ACAACGAGGCTGCAAGAGAGATCCTCCTGATGCCCACTCCAGGGAAGCATGGTTGGAC | |
| | AGTGCTCCAGGGAAGAATCGGGCGTCCAGACAACCCATTTCGAGTGGCCCTGGAATAC | |
| | ATCTCCAGTGGAAACCGCAGCTTGTCTGCAGTGGACTTCTTTGCCCTGAAGAACTGCA | |
| | GTGAAGGAACATCCCCAGGCTCCAAGATGGCCCTGCAGAGCTCCTTCACTTGTTGGAA | |
| | TGGGACAGTCCTCCAGCTTGGGCAGGCCTGTGACTTCCACCAGGACTGTGCCCAGGGA | |
| | GAAGATGAGAGCCAGATGTGCCGGAAACTGCCTGTGGGTTTTTACTGCAACTTTGAAG | |
| | ATGGCTTCTGTGGCTGGACCCAAGGCACACTGTCACCCCACACTCCTCAATGGCAGGT | |
| | CAGGACCCTAAAGGATGCCCGGTTCCAGGACCACCAAGACCATGCTCTATTGCTCAGT | |
| | ACCACTGATGTCCCCGCTTCTGAAAGTGCTACAGTGACCAGTGCTACGTTTCCTGCAC | |
| | CGATCAAGAGCTCTCCATGTGAGCTCCGAATGTCCTGGCTCATTCGTGGAGTCTTGAG | |
| | GGGAAACGTGTCCTTGGTGCTAGTGGAGAACAAAACCGGGAAGGAGCAAGGCAGGATG | |
| | GTCTGGCATGTCGCCGCCTATGAAGGCTTGAGCCTGTGGCAGTGGATGGTGTTGCCTC | |
| | TCCTCGATGTGTCTGACAGGTTCTGGCTGCAGATGGTCGCATGGTGGGGACAAGGATC | |
| | CAGAGCCATCGTGGCTTTTGACAATATCTCCATCAGCCTGGACTGCTACCTCACCATT | |
| | AGCGGAGAGGACAAGATCCTGCAGAATACAGCACCCAAATCAAGAAACCTGTTTGAGA | |
| | GAAACCCAAACAAGGAGCTGAAACCCGGGGAAAATTCACCAAGACAGACCCCCATCTT | |
| | TGACCCTACAGTTCATTGGCTGTTCACCACATGTGGGGCCAGCGGGCCCCATGGCCCC | |
| | ACCCAGGCACAGTGCAACAACGCCTACCAGAACTCCAACCTGAGCGTGGAGGTGGGGA | |
| | GCGAGGGCCCCCTGAAAGGCATCCAGATCTGGAAGGTGCCAGCCACCGACACCTACAG | |
| | CATCTCGGGCTACGGAGCTGCTGGCGGGAAAGGCGGGAAGAACACCATGATGCGGTCC | |
| | CACGGCGTGTCTGTGCTGGGCATCTTCAACCTGGAGAAGGATGACATGCTGTACATCC | |
| | TGGTTGGGCAGCAGGGAGAGGACGCCTGCCCCAGTACAAACCAGTTAATCCAGAAAGT | |
| | CTGCATTGGAGAGAACAATGTGATAGAAGAAGAAATCCGTGTGAACAGAAGCGTGCAT | |
| | GAGTGGGCAGGAGGCGGAGGAGGAGGGGGTGGAGCCACCTACGTATTTAAGATGAAGG | |
| | ATGGAGTGCCGGTGCCCCTGATCATTGCAGCCGGAGGTGGTGGCAGGGCCTACGGGGC | |
| | CAAGACAGACACGTTCCACCCAGAGAGACTGGAGAATAACTCCTCGGTTCTAGGGCTA | |
| | AACGGCAATTCCGGAGCCGCAGGTGGTGGAGGTGGCTGGAATGATAACACTTCCTTGC | |
| | TCTGGGCCGGAAAATCTTTGCAGGAGGGTGCCACCGGAGGACATTCCTGCCCCCAGGC | |
| | CATGAAGAAGTGGGGGTGGGAGACAAGAGGGGGTTTCGGAGGGGGTGGAGGGGGGTGC | |
| | TCCTCAGGTGGAGGAGGCGGAGGATATATAGGCGGCAATGCAGCCTCAAACAATGACC | |
| | CCGAAATGGATGGGGAAGATGGGGTTTCCTTCATCAGTCCACTGGGCATCCTGTACAC | |
| | CCCAGCTTTAAAAGTGATGGAAGGCCACGGGGAAGTGAATATTAAGCATTATCTAAAC | |
| | TGCAGTCACTGTGAGGTAGACGAATGTCACATGGACCCTGAAAGCCACAAGGTCATCT | |
| | GCTTCTGTGACCACGGGACGGTGCTGGCTGAGGATGGCGTCTCCTGCATTGCTTTAAC | |
| | TGCCTATACTTACCTGACCATTTTTGATCTTTTTAGTTTAATGACATGTTTAATAAGT | |
| | TACTGGGTAACATTGAGGAAACCTAGCCCTGTCTATTCATTTGGGTTTGAAAGATTAG | |
| | AAGTCCTGGCTGTATTTGCCTCCACAGTCTTGGCACAGTTGGGAGCTCTCTTTATATT | |
| | AAAAGAAAGTGCAGAACGCTTTTTGGAACAGCCCGAGATACACACGGGAAGATTATTA | |
| | GTTGGTACTTTTGTGGCTCTTTGTTTCAACCTGTTCACGATGCTTTCTATTCGGAATA | |
| | AACCTTTTGCTTATGTCTCAGAAGCTGCTAGTACGAGCTGGCTTCAAGAGCATGTTGC | |
| | AGATCTTAGTCGAAGCTTGTGTGGAATTATTCCGGGACTTAGCAGTATCTTCCTTCCC | |
| | CGAATGAATCCATTTGTTTTGATTGATCTTGCTGGAGCATTTGCTCTTTGTATTACAT | |
| | ATATGCTCATTGAAATTAATAATTATTTTGCCGTAGACACTGCCTCTGCTATAGCTAT | |
| | TGCCTTGATGACATTTGGCACTATGTATCCCATGAGTGTGTACAGTGGGAAAGTCTTA | |
| | CTCCAGACAACACCACCCCATGTTATTGGTCAGTTGGACAAACTCATCAGAGAGGTAT | |
| | CTACCTTAGATGGAGTTTTAGAAGTCCGAAATGAACATTTTTGGACCCTAGGTTTTGG | |
| | CTCATTGGCTGGATCAGTGCATGTAAGAATTCGACGAGATGCCAATGAACAAATGGTT | |
| | CTTGCTCATGTGACCAACAGGCTGTACACTCTAGTGTCTACTCTAACTGTTCAAATTT | |
| | TCAAGGATGACTGGATTAGGCCTGCCTTATTGTCTGGGCCTGTTGCAGCCAATGTCCT | |
| | AAACTTTTCAGATCATCACGTAATCCCAATGCCTCTTTTAAAGGGTACTGATGATTTG | |
| | AACCCAGTTACATCAACTCCAGCTAAACCTAGTAGTCCACCTCCAGAATTTTCATTTA | |
| | ACACTCCTGGGAAAAATGTGAACCCAGTTATTCTTCTAAACACACAAACAAGGCCTTA | |
| | TGGTTTTGGTCTCAATCATGGACACACACCTTACAGCAGCATGCTTAATCAAGGACTT | |
| | GGAGTTCCAGGAATTGGAGCAACTCAAGGATTGAGGACTGGTTTTACAAATATACCAA | |
| | GTAGATATGGAACTAATAATAGAATTGGACAACCAAGACCATGA | |
| ALK- | ATGGGAGCCATCGGGCTCCTGTGGCTCCTGCCGCTGCTGCTTTCCACGGCAGCTGTGG | 25 |
| GMCL1 | GCTCCGGGATGGGGACCGGCCAGCGCGCGGGCTCCCCAGCTGCGGGGCCGCCGCTGCA | |
| | GCCCCGGGAGCCACTCAGCTACTCGCGCCTGCAGAGGAAGAGTCTGGCAGTTGACTTC | |
| | GTGGTGCCCTCGCTCTTCCGTGTCTACGCCCGGGACCTACTGCTGCCACCATCCTCCT | |
| | CGGAGCTGAAGGCTGGCAGGCCCGAGGCCCGCGGCTCGCTAGCTCTGGACTGCGCCCC | |
| | GCTGCTCAGGTTGCTGGGGCCGGCGCCGGGGGTCTCCTGGACCGCCGGTTCACCAGCC | |
| | CCGGCAGAGGCCCGGACGCTGTCCAGGGTGCTGAAGGGCGGCTCCGTGCGCAAGCTCC | |
| | GGCGTGCCAAGCAGTTGGTGCTGGAGCTGGGCGAGGAGGCGATCTTGGAGGGTTGCGT | |
| | CGGGCCCCCCGGGGAGGCGGCTGTGGGGCTGCTCCAGTTCAATCTCAGCGAGCTGTTC | |
| | AGTTGGTGGATTCGCCAAGGCGAAGGGCGACTGAGGATCCGCCTGATGCCCGAGAAGA | |
| | AGGCGTCGGAAGTGGGCAGAGAGGGAAGGCTGTCCGCGGCAATTCGCGCCTCCCAGCC | |
| | CCGCCTTCTCTTCCAGATCTTCGGGACTGGTCATAGCTCCTTGGAATCACCAACAAAC | |
| | ATGCCTTCTCCTTCTCCTGATTATTTTACATGGAATCTCACCTGGATAATGAAAGACT | |
| | CCTTCCCTTTCCTGTCTCATCGCAGCCGATATGGTCTGGAGTGCAGCTTTGACTTCCC | |
| | CTGTGAGCTGGAGTATTCCCCTCCACTGCATGACCTCAGGAACCAGAGCTGGTCCTGG | |
| | CGCCGCATCCCCTCCGAGGAGGCCTCCCAGATGGACTTGCTGGATGGGCCTGGGGCAG | |
| | AGCGTTCTAAGGAGATGCCCAGAGGCTCCTTTCTCCTTCTCAACACCTCAGCTGACTC | |
| | CAAGCACACCATCCTGAGTCCGTGGATGAGGAGCAGCAGTGAGCACTGCACACTGGCC | |
| | GTCTCGGTGCACAGGCACCTGCAGCCCTCTGGAAGGTACATTGCCCAGCTGCTGCCCC | |
| | ACAACGAGGCTGCAAGAGAGATCCTCCTGATGCCCACTCCAGGGAAGCATGGTTGGAC | |
| | AGTGCTCCAGGGAAGAATCGGGCGTCCAGACAACCCATTTCGAGTGGCCCTGGAATAC | |
| | ATCTCCAGTGGAAACCGCAGCTTGTCTGCAGTGGACTTCTTTGCCCTGAAGAACTGCA | |
| | GTGAAGGAACATCCCCAGGCTCCAAGATGGCCCTGCAGAGCTCCTTCACTTGTTGGAA | |
| | TGGGACAGTCCTCCAGCTTGGGCAGGCCTGTGACTTCCACCAGGACTGTGCCCAGGGA | |
| | GAAGATGAGAGCCAGATGTGCCGGAAACTGCCTGTGGGTTTTTACTGCAACTTTGAAG | |
| | ATGGCTTCTGTGGCTGGACCCAAGGCACACTGTCACCCCACACTCCTCAATGGCAGGT | |
| | CAGGACCCTAAAGGATGCCCGGTTCCAGGACCACCAAGACCATGCTCTATTGCTCAGT | |
| | ACCACTGATGTCCCCGCTTCTGAAAGTGCTACAGTGACCAGTGCTACGTTTCCTGCAC | |
| | CGATCAAGAGCTCTCCATGTGAGCTCCGAATGTCCTGGCTCATTCGTGGAGTCTTGAG | |
| | GGGAAACGTGTCCTTGGTGCTAGTGGAGAACAAAACCGGGAAGGAGCAAGGCAGGATG | |
| | GTCTGGCATGTCGCCGCCTATGAAGGCTTGAGCCTGTGGCAGTGGATGGTGTTGCCTC | |
| | TCCTCGATGTGTCTGACAGGTTCTGGCTGCAGATGGTCGCATGGTGGGGACAAGGATC | |
| | CAGAGCCATCGTGGCTTTTGACAATATCTCCATCAGCCTGGACTGCTACCTCACCATT | |
| | AGCGGAGAGGACAAGATCCTGCAGAATACAGCACCCAAATCAAGAAACCTGTTTGAGA | |
| | GAAACCCAAACAAGGAGCTGAAACCCGGGGAAAATTCACCAAGACAGACCCCCATCTT | |
| | TGACCCTACAGTTCATTGGCTGTTCACCACATGTGGGGCCAGCGGGCCCCATGGCCCC | |
| | ACCCAGGCACAGTGCAACAACGCCTACCAGAACTCCAACCTGAGCGTGGAGGTGGGGA | |
| | GCGAGGGCCCCCTGAAAGGCATCCAGATCTGGAAGGTGCCAGCCACCGACACCTACAG | |
| | CATCTCGGGCTACGGAGCTGCTGGCGGGAAAGGCGGGAAGAACACCATGATGCGGTCC | |
| | CACGGCGTGTCTGTGCTGGGCATCTTCAACCTGGAGAAGGATGACATGCTGTACATCC | |
| | TGGTTGGGCAGCAGGGAGAGGACGCCTGCCCCAGTACAAACCAGTTAATCCAGAAAGT | |
| | CTGCATTGGAGAGAACAATGTGATAGAAGAAGAAATCCGTGTGAACAGAAGCGTGCAT | |
| | GAGTGGGCAGGAGGCGGAGGAGGAGGGGGTGGAGCCACCTACGTATTTAAGATGAAGG | |
| | ATGGAGTGCCGGTGCCCCTGATCATTGCAGCCGGAGGTGGTGGCAGGGCCTACGGGGC | |
| | CAAGACAGACACGTTCCACCCAGAGAGACTGGAGAATAACTCCTCGGTTCTAGGGCTA | |
| | AACGGCAATTCCGGAGCCGCAGGTGGTGGAGGTGGCTGGAATGATAACACTTCCTTGC | |
| | TCTGGGCCGGAAAATCTTTGCAGGAGGGTGCCACCGGAGGACATTCCTGCCCCCAGGC | |
| | CATGAAGAAGTGGGGGTGGGAGACAAGAGGGGGTTTCGGAGGGGGTGGAGGGGGGTGC | |
| | TCCTCAGGTGGAGGAGGCGGAGGATATATAGGCGGCAATGCAGCCTCAAACAATGACC | |
| | CCGAAATGGATGGGGAAGATGGGGTTTCCTTCATCAGTCCACTGGGCATCCTGTACAC | |
| | CCCAGCTTTAAAAGTGATGGAAGGCCACGGGGAAGTGAATATTAAGCATTATCTAAAC | |
| | TGCAGTCACTGTGAGGTAGACGAATGTCACATGGACCCTGAAAGCCACAAGGTCATCT | |
| | GCTTCTGTGACCACGGGACGGTGCTGGCTGAGGATGGCGTCTCCTGCATTGTGTCACC | |
| | CACCCCGGAGCCACACCTGCCACTCTCGCTGATCCTCTCTGTGGTGACCTCTGCCCTC | |
| | GTGGCCGCCCTGGTCCTGGCTTTCTCCGGCATCATGATTGTGTACCGCCGGAAGCACC | |
| | AGGAGCTGCAAGCCATGCAGATGGAGCTGCAGAGCCCTGAGTACAAGCTGAGCAAGCT | |
| | CCGCACCTCGACCATCATGACCGACTACAACCCCAACTACTGCTTTGCTGGCAAGACC | |
| | TCCTCCATCAGTGACCTGAAGGAGGTGCCGCGGAAAAACATCACCCTCATTCGGGGTC | |
| | TGGGCCATGGCGCCTTTGGGGAGGTGTATGAAGGCCAGGTGTCCGGAATGCCCAACGA | |
| | CCCAAGCCCCCTGCAAGTGGCTGTGAAGACGCTGCCTGAAGTGTGCTCTGAACAGGAC | |
| | GAACTGGATTTCCTCATGGAAGCCCTGATCATCAGCAAATTCAACCACCAGAACATTG | |
| | TTCGCTGCATTGGGGTGAGCCTGCAATCCCTGCCCCGGTTCATCCTGCTGGAGCTCAT | |
| | GGCGGGGGGAGACCTCAAGTCCTTCCTCCGAGAGACCCGCCCTCGCCCGAGCCAGCCC | |
| | TCCTCCCTGGCCATGCTGGACCTTCTGCACGTGGCTCGGGACATTGCCTGTGGCTGTC | |
| | AGTATTTGGAGGAAAACCACTTCATCCACCGAGACATTGCTGCCAGAAACTGCCTCTT | |
| | GACCTGTCCAGGCCCTGGAAGAGTGGCCAAGATTGGAGACTTCGGGATGGCCCGAGAC | |
| | ATCTACAGGGCGAGCTACTATAGAAAGGGAGGCTGTGCCATGCTGCCAGITAAGTGGA | |
| | TGCCCCCAGAGGCCTTCATGGAAGGAATATTCACTTCTAAAACAGACACATGGTCCTT | |
| | TGGAGTGCTGCTATGGGAAATCTTTTCTCTTGGATATATGCCATACCCCAGCAAAAGC | |
| | AACCAGGAAGTTCTGGAGTTTGTCACCAGTGGAGGCCGGATGGACCCACCCAAGAACT | |
| | GCCCTGGGCCTGTTATAAATGTCATGAAACAGCTCATTGGTTCATCTAACTTATTTGT | |
| | GATGCAAGTGGAGATGGATATATACACTGCTCTAAAAAAGTGGATGTTCCTTCAACTT | |
| | GTGCCTTCTTGGAATGGATCTTTAAAACAGCTTTTGACAGAAACAGATGTCTGGTTTT | |
| | CTAAACAGAGGAAAGATTTTGAAGGTATGGCCTTTCTTGAAACTGAACAAGGAAAACC | |
| | ATTTGTGTCAGTATTCAGACATTTAAGGTTACAATATATTATCAGTGATCTGGCTTCT | |
| | GCAAGAATTATTGAACAAGATGCTGTAGTACCTTCAGAATGGCTCTCTTCTGTGTATA | |
| | AACAGCAGTGGTTTGCTATGCTGCGGGCAGAACAGGACAGTGAGGTGGGGCCTCAAGA | |
| | AATCAATAAAGAAGAACTAGAGGGAAACAGCATGAGGTGTGGTAGAAAGCTTGCCAAA | |
| | GATGGTGAATACTGCTGGCGTTGGACAGGTTTTAACTTCGGCTTCGACCTACTTGTAA | |
| | CTTACACCAATCGATACATCATTTTCAAACGCAATACACTGAATCAGCCATGTAGCGG | |
| | ATCTGTCAGTTTACAGCCTCGAAGGAGCATAGCATTTAGATTACGTTTGGCTTCTTTT | |
| | GATAGTAGTGGAAAACTAATATGTAGTAGAACAACTGGCTATCAAATACTTACACTTG | |
| | AAAAGGATCAGGAACAAGTGGTGATGAACTTGGACAGCAGGCTTCTGATCTTCCCTTT | |
| | ATATATCTGCTGTAACTTCTTGTATATATCACCAGAAAAAAAGAATTGA | |
| ALK- | ATGGGAGCCATCGGGCTCCTGTGGCTCCTGCCGCTGCTGCTTTCCACGGCAGCTGTGG | 26 |
| AGAP1 | GCTCCGGGATGGGGACCGGCCAGCGCGCGGGCTCCCCAGCTGCGGGGCCGCCGCTGCA | |
| | GCCCCGGGAGCCACTCAGCTACTCGCGCCTGCAGAGGAAGAGTCTGGCAGTTGACTTC | |
| | GTGGTGCCCTCGCTCTTCCGTGTCTACGCCCGGGACCTACTGCTGCCACCATCCTCCT | |
| | CGGAGCTGAAGGCTGGCAGGCCCGAGGCCCGCGGCTCGCTAGCTCTGGACTGCGCCCC | |
| | GCTGCTCAGGTTGCTGGGGCCGGCGCCGGGGGTCTCCTGGACCGCCGGTTCACCAGCC | |
| | CCGGCAGAGGCCCGGACGCTGTCCAGGGTGCTGAAGGGCGGCTCCGTGCGCAAGCTCC | |
| | GGCGTGCCAAGCAGTTGGTGCTGGAGCTGGGCGAGGAGGCGATCTTGGAGGGTTGCGT | |
| | CGGGCCCCCCGGGGAGGCGGCTGTGGGGCTGCTCCAGTTCAATCTCAGCGAGCTGTTC | |
| | AGTTGGTGGATTCGCCAAGGCGAAGGGCGACTGAGGATCCGCCTGATGCCCGAGAAGA | |
| | AGGCGTCGGAAGTGGGCAGAGAGGGAAGGCTGTCCGCGGCAATTCGCGCCTCCCAGCC | |
| | CCGCCTTCTCTTCCAGATCTTCGGGACTGGTCATAGCTCCTTGGAATCACCAACAAAC | |
| | ATGCCTTCTCCTTCTCCTGATTATTTTACATGGAATCTCACCTGGATAATGAAAGACT | |
| | CCTTCCCTTTCCTGTCTCATCGCAGCCGATATGGTCTGGAGTGCAGCTTTGACTTCCC | |
| | CTGTGAGCTGGAGTATTCCCCTCCACTGCATGACCTCAGGAACCAGAGCTGGTCCTGG | |
| | CGCCGCATCCCCTCCGAGGAGGCCTCCCAGATGGACTTGCTGGATGGGCCTGGGGCAG | |
| | AGCGTTCTAAGGAGATGCCCAGAGGCTCCTTTCTCCTTCTCAACACCTCAGCTGACTC | |
| | CAAGCACACCATCCTGAGTCCGTGGATGAGGAGCAGCAGTGAGCACTGCACACTGGCC | |
| | GTCTCGGTGCACAGGCACCTGCAGCCCTCTGGAAGGTACATTGCCCAGCTGCTGCCCC | |
| | ACAACGAGGCTGCAAGAGAGATCCTCCTGATGCCCACTCCAGGGAAGCATGGTTGGAC | |
| | AGTGCTCCAGGGAAGAATCGGGCGTCCAGACAACCCATTTCGAGTGGCCCTGGAATAC | |
| | ATCTCCAGTGGAAACCGCAGCTTGTCTGCAGTGGACTTCTTTGCCCTGAAGAACTGCA | |
| | GTGAAGGAACATCCCCAGGCTCCAAGATGGCCCTGCAGAGCTCCTTCACTTGTTGGAA | |
| | TGGGACAGTCCTCCAGCTTGGGCAGGCCTGTGACTTCCACCAGGACTGTGCCCAGGGA | |
| | GAAGATGAGAGCCAGATGTGCCGGAAACTGCCTGTGGGTTTTTACTGCAACTTTGAAG | |
| | ATGGCTTCTGTGGCTGGACCCAAGGCACACTGTCACCCCACACTCCTCAATGGCAGGT | |
| | CAGGACCCTAAAGGATGCCCGGTTCCAGGACCACCAAGACCATGCTCTATTGCTCAGT | |
| | ACCACTGATGTCCCCGCTTCTGAAAGTGCTACAGTGACCAGTGCTACGTTTCCTGCAC | |
| | CGATCAAGAGCTCTCCATGTGAGCTCCGAATGTCCTGGCTCATTCGTGGAGTCTTGAG | |
| | GGGAAACGTGTCCTTGGTGCTAGTGGAGAACAAAACCGGGAAGGAGCAAGGCAGGATG | |
| | GTCTGGCATGTCGCCGCCTATGAAGGCTTGAGCCTGTGGCAGTGGATGGTGTTGCCTC | |
| | TCCTCGATGTGTCTGACAGGTTCTGGCTGCAGATGGTCGCATGGTGGGGACAAGGATC | |
| | CAGAGCCATCGTGGCTTTTGACAATATCTCCATCAGCCTGGACTGCTACCTCACCATT | |
| | AGCGGAGAGGACAAGATCCTGCAGAATACAGCACCCAAATCAAGAAACCTGTTTGAGA | |
| | GAAACCCAAACAAGGAGCTGAAACCCGGGGAAAATTCACCAAGACAGACCCCCATCTT | |
| | TGACCCTACAGTTCATTGGCTGTTCACCACATGTGGGGCCAGCGGGCCCCATGGCCCC | |
| | ACCCAGGCACAGTGCAACAACGCCTACCAGAACTCCAACCTGAGCGTGGAGGTGGGGA | |
| | GCGAGGGCCCCCTGAAAGGCATCCAGATCTGGAAGGTGCCAGCCACCGACACCTACAG | |
| | CATCTCGGGCTACGGAGCTGCTGGCGGGAAAGGCGGGAAGAACACCATGATGCGGTCC | |
| | CACGGCGTGTCTGTGCTGGGCATCTTCAACCTGGAGAAGGATGACATGCTGTACATCC | |
| | TGGTTGGGCAGCAGGGAGAGGACGCCTGCCCCAGTACAAACCAGTTAATCCAGAAAGT | |
| | CTGCATTGGAGAGAACAATGTGATAGAAGAAGAAATCCGTGTGAACAGAAGCGTGCAT | |
| | GAGTGGGCAGGAGGCGGAGGAGGAGGGGGTGGAGCCACCTACGTATTTAAGATGAAGG | |
| | ATGGAGTGCCGGTGCCCCTGATCATTGCAGCCGGAGGTGGTGGCAGGGCCTACGGGGC | |
| | CAAGACAGACACGTTCCACCCAGAGAGACTGGAGAATAACTCCTCGGTTCTAGGGCTA | |
| | AACGGCAATTCCGGAGCCGCAGGTGGTGGAGGTGGCTGGAATGATAACACTTCCTTGC | |
| | TCTGGGCCGGAAAATCTTTGCAGGAGGGTGCCACCGGAGGACATTCCTGCCCCCAGGC | |
| | CATGAAGAAGTGGGGGTGGGAGACAAGAGGGGGTTTCGGAGGGGGTGGAGGGGGGTGC | |
| | TCCTCAGGTGGAGGAGGCGGAGGATATATAGGCGGCAATGCAGCCTCAAACAATGACC | |
| | CCGAAATGGATGGGGAAGATGGGGTTTCCTTCATCAGTCCACTGGGCATCCTGTACAC | |
| | CCCAGCTTTAAAAGTGATGGAAGGCCACGGGGAAGTGAATATTAAGCATTATCTAAAC | |
| | TGCAGTCACTGTGAGGTAGACGAATGTCACATGGACCCTGAAAGCCACAAGGTCATCT | |
| | GCTTCTGTGACCACGGGACGGTGCTGGCTGAGGATGGCGTCTCCTGCATTGTGTCACC | |
| | CACCCCGGAGCCACACCTGCCACTCTCGCTGATCCTCTCTGTGGTGACCTCTGCCCTC | |
| | GTGGCCGCCCTGGTCCTGGCTTTCTCCGGCATCATGATTGTTGCCCAGAAGATTGTTG | |
| | CCACAAGGAAGAAGCAGCAGCTGTCCATAGGACCCTGCAAGTCGCTACCTAATTCTCC | |
| | CAGCCATTCCTCCGTCTGTTCCGCGCAGGTGTCTGCCGTGCACATCAGCCAGACAAGT | |
| | AATGGAGGTGGGAGTTTAAGCGACTATTCCTCCTCCGTTCCATCGACTCCCAGCACCA | |
| | GCCAGAAGGAACTTCGGATCGATGTTCCTCCCACTGCCAACACGCCCACGCCCGTTCG | |
| | CAAGCAGTCTAAGCGCCGGTCCAACCTGTTCACCTCTCGGAAAGGGAGCGACCCAGAC | |
| | AAAGAGAAGAAAGGCCTGGAGAGTCGTGCGGACAGCATTGGGAGCGGCCGAGCCATCC | |
| | CAATTAAACAGGGCATGCTGTTGAAGCGAAGTGGCAAATCGTTGAATAAAGAGTGGAA | |
| | AAAGAAATATGTCACCCTGTGTGACAATGGCGTGCTGACCTATCATCCCAGTTTACAT | |
| | GATTACATGCAGAATGTTCATGGTAAGGAGATTGACCTTCTGAGAACCACTGTGAAAG | |
| | TCCCAGGGAAGAGGCCACCCCGAGCCACGTCAGCCTGCGCACCCATCTCCAGCCCTAA | |
| | AACCAATGGCCTATCCAAGGACATGAGCAGTTTACACATCTCACCCAATTCAGACACA | |
| | GGGCTGGGTGACTCCGTATGCTCCAGCCCCAGTATCTCCAGCACCACCAGCCCCAAGC | |
| | TCGACCCGCCCCCCTCCCCTCACGCCAACAGAAAGAAGCACCGAAGGAAGAAAAGCAC | |
| | TAGCAACTTCAAAGCCGACGGCCTGTCCGGCACTGCTGAAGAACAAGAAGAAAATTTT | |
| | GAGTTTATCATTGTGTCCCTCACTGGCCAAACATGGCACTTTGAAGCCACGACGTATG | |
| | AGGAGCGGGACGCCTGGGTCCAAGCCATCGAGAGCCAGATCCTGGCCAGCCTGCAGTC | |
| | GTGCGAGAGCAGCAAGAACAAGTCCCGGCTGACGAGCCAGAGCGAGGCCATGGCCCTG | |
| | CAGTCGATCCGGAACATGCGCGGGAACTCCCACTGTGTGGACTGCGAGACCCAGAATC | |
| | CCAACTGGGCCAGTTTGAACTTGGGAGCCCTCATGTGCATCGAATGCTCAGGGATCCA | |
| | CCGGAATCTTGGCACCCACCTTTCCCGAGTCCGATCTCTGGACCTGGATGACTGGCCA | |
| | GTCGAGCTCATCAAGGTGATGTCATCCATCGGGAACGAGCTAGCCAACAGCGTCTGGG | |
| | AAGAGAGCAGCCAGGGGCGGACGAAACCATCGGTAGACTCCACAAGGGAAGAGAAGGA | |
| | ACGGTGGATCCGTGCCAAGTACGAGCAGAAGCTCTTCCTGGCCCCGCTGCCCTGCACG | |
| | GAGCTGTCCCTGGGCCAGCACCTGCTGCGGGCCACCGCCGACGAGGACCTGCGGACGG | |
| | CCATCCTGCTGCTGGCACACGGCTCCCGGGACGAGGTGAACGAGACCTGCGGGGAGGG | |
| | AGACGGCCGCACGGCGCTGCATCTGGCCTGCCGCAAGGGGAATGTGGTCCTGGCGCAG | |
| | CTCCTGATCTGGTACGGAGTGGACGTCACGGCCCGAGATGCCCACGGGAACACAGCTC | |
| | TGGCCTACGCCCGGCAGGCCTCCAGCCAGGAGTGCATCGACGTGCTGCTGCAGTACGG | |
| | CTGCCCCGACGAGCGCTTCGTGCTCATGGCCACCCCTAACCTGTCCAGGAGAAACAAT | |
| | AACCGGAACAACAGCAGTGGGAGGGTGCCCACCATCATCTGA | |
| ALK- | ATGGGAGCCATCGGGCTCCTGTGGCTCCTGCCGCTGCTGCTTTCCACGGCAGCTGTGG | 27 |
| ZNF454 | GCTCCGGGATGGGGACCGGCCAGCGCGCGGGCTCCCCAGCTGCGGGGCCGCCGCTGCA | |
| | GCCCCGGGAGCCACTCAGCTACTCGCGCCTGCAGAGGAAGAGTCTGGCAGTTGACTTC | |
| | GTGGTGCCCTCGCTCTTCCGTGTCTACGCCCGGGACCTACTGCTGCCACCATCCTCCT | |
| | CGGAGCTGAAGGCTGGCAGGCCCGAGGCCCGCGGCTCGCTAGCTCTGGACTGCGCCCC | |
| | GCTGCTCAGGTTGCTGGGGCCGGCGCCGGGGGTCTCCTGGACCGCCGGTTCACCAGCC | |
| | CCGGCAGAGGCCCGGACGCTGTCCAGGGTGCTGAAGGGCGGCTCCGTGCGCAAGCTCC | |
| | GGCGTGCCAAGCAGTTGGTGCTGGAGCTGGGCGAGGAGGCGATCTTGGAGGGTTGCGT | |
| | CGGGCCCCCCGGGGAGGCGGCTGTGGGGCTGCTCCAGTTCAATCTCAGCGAGCTGTTC | |
| | AGTTGGTGGATTCGCCAAGGCGAAGGGCGACTGAGGATCCGCCTGATGCCCGAGAAGA | |
| | AGGCGTCGGAAGTGGGCAGAGAGGGAAGGCTGTCCGCGGCAATTCGCGCCTCCCAGCC | |
| | CCGCCTTCTCTTCCAGATCTTCGGGACTGGTCATAGCTCCTTGGAATCACCAACAAAC | |
| | ATGCCTTCTCCTTCTCCTGATTATTTTACATGGAATCTCACCTGGATAATGAAAGACT | |
| | CCTTCCCTTTCCTGTCTCATCGCAGCCGATATGGTCTGGAGTGCAGCTTTGACTTCCC | |
| | CTGTGAGCTGGAGTATTCCCCTCCACTGCATGACCTCAGGAACCAGAGCTGGTCCTGG | |
| | CGCCGCATCCCCTCCGAGGAGGCCTCCCAGATGGACTTGCTGGATGGGCCTGGGGCAG | |
| | AGCGTTCTAAGGAGATGCCCAGAGGCTCCTTTCTCCTTCTCAACACCTCAGCTGACTC | |
| | CAAGCACACCATCCTGAGTCCGTGGATGAGGAGCAGCAGTGAGCACTGCACACTGGCC | |
| | GTCTCGGTGCACAGGCACCTGCAGCCCTCTGGAAGGTACATTGCCCAGCTGCTGCCCC | |
| | ACAACGAGGCTGCAAGAGAGATCCTCCTGATGCCCACTCCAGGGAAGCATGGTTGGAC | |
| | AGTGCTCCAGGGAAGAATCGGGCGTCCAGACAACCCATTTCGAGTGGCCCTGGAATAC | |
| | ATCTCCAGTGGAAACCGCAGCTTGTCTGCAGTGGACTTCTTTGCCCTGAAGAACTGCA | |
| | GTGAAGGAACATCCCCAGGCTCCAAGATGGCCCTGCAGAGCTCCTTCACTTGTTGGAA | |
| | TGGGACAGTCCTCCAGCTTGGGCAGGCCTGTGACTTCCACCAGGACTGTGCCCAGGGA | |
| | GAAGATGAGAGCCAGATGTGCCGGAAACTGCCTGTGGGTTTTTACTGCAACTTTGAAG | |
| | ATGGCTTCTGTGGCTGGACCCAAGGCACACTGTCACCCCACACTCCTCAATGGCAGGT | |
| | CAGGACCCTAAAGGATGCCCGGTTCCAGGACCACCAAGACCATGCTCTATTGCTCAGT | |
| | ACCACTGATGTCCCCGCTTCTGAAAGTGCTACAGTGACCAGTGCTACGTTTCCTGCAC | |
| | CGATCAAGAGCTCTCCATGTGAGCTCCGAATGTCCTGGCTCATTCGTGGAGTCTTGAG | |
| | GGGAAACGTGTCCTTGGTGCTAGTGGAGAACAAAACCGGGAAGGAGCAAGGCAGGATG | |
| | GTCTGGCATGTCGCCGCCTATGAAGGCTTGAGCCTGTGGCAGTGGATGGTGTTGCCTC | |
| | TCCTCGATGTGTCTGACAGGTTCTGGCTGCAGATGGTCGCATGGTGGGGACAAGGATC | |
| | CAGAGCCATCGTGGCTTTTGACAATATCTCCATCAGCCTGGACTGCTACCTCACCATT | |
| | AGCGGAGAGGACAAGATCCTGCAGAATACAGCACCCAAATCAAGAAACCTGTTTGAGA | |
| | GAAACCCAAACAAGGAGCTGAAACCCGGGGAAAATTCACCAAGACAGACCCCCATCTT | |
| | TGACCCTACAGTTCATTGGCTGTTCACCACATGTGGGGCCAGCGGGCCCCATGGCCCC | |
| | ACCCAGGCACAGTGCAACAACGCCTACCAGAACTCCAACCTGAGCGTGGAGGTGGGGA | |
| | GCGAGGGCCCCCTGAAAGGCATCCAGATCTGGAAGGTGCCAGCCACCGACACCTACAG | |
| | CATCTCGGGCTACGGAGCTGCTGGCGGGAAAGGCGGGAAGAACACCATGATGCGGTCC | |
| | CACGGCGTGTCTGTGCTGGGCATCTTCAACCTGGAGAAGGATGACATGCTGTACATCC | |
| | TGGTTGGGCAGCAGGGAGAGGACGCCTGCCCCAGTACAAACCAGTTAATCCAGAAAGT | |
| | CTGCATTGGAGAGAACAATGTGATAGAAGAAGAAATCCGTGTGAACAGAAGCGTGCAT | |
| | GAGTGGGCAGGAGGCGGAGGAGGAGGGGGTGGAGCCACCTACGTATTTAAGATGAAGG | |
| | ATGGAGTGCCGGTGCCCCTGATCATTGCAGCCGGAGGTGGTGGCAGGGCCTACGGGGC | |
| | CAAGACAGACACGTTCCACCCAGAGAGACTGGAGAATAACTCCTCGGTTCTAGGGCTA | |
| | AACGGCAATTCCGGAGCCGCAGGTGGTGGAGGTGGCTGGAATGATAACACTTCCTTGC | |
| | TCTGGGCCGGAAAATCTTTGCAGGAGGGTGCCACCGGAGGACATTCCTGCCCCCAGGC | |
| | CATGAAGAAGTGGGGGTGGGAGACAAGAGGGGGTTTCGGAGGGGGTGGAGGGGGGTGC | |
| | TCCTCAGGTGGAGGAGGCGGAGGATATATAGGCGGCAATGCAGCCTCAAACAATGACC | |
| | CCGAAATGGATGGGGAAGATGGGGTTTCCTTCATCAGTCCACTGGGCATCCTGTACAC | |
| | CCCAGCTTTAAAAGTGATGGAAGGCCACGGGGAAGTGAATATTAAGCATTATCTAAAC | |
| | TGCAGTCACTGTGAGGTAGACGAATGTCACATGGACCCTGAAAGCCACAAGGTCATCT | |
| | GCTTCTGTGACCACGGGACGGTGCTGGCTGAGGATGGCGTCTCCTGCATTGTGTCACC | |
| | CACCCCGGAGCCACACCTGCCACTCTCGCTGATCCTCTCTGTGGTGACCTCTGCCCTC | |
| | GTGGCCGCCCTGGTCCTGGCTTTCTCCGGCATCATGATTGACTGGATGACTATGCCTG | |
| | CCAGTAAGAAATCTACTGTCAAGGCAGAGATTCCTGAAGAAGAATTGGATCAATGGAC | |
| | AATAAAGGAAAGATTCAGTAGCAGTAGTCACTGGAAGTGTGCTAGCCTGCTGGAGTGG | |
| | CAATGTGGAGGCCAGGAGATCAGTTTGCAGCGAGTGGTACTCACTCACCCCAACACCC | |
| | CATCACAGGAATGTGATGAATCCGGGAGCACTATGAGCTCATCTCTTCACAGTGATCA | |
| | AAGTCAGGGATTTCAACCTAGCAAAAATGCCTTTGAGTGTAGTGAGTGTGGAAAAGTC | |
| | TTCTCTAAGAGTTCAACTCTTAATAAACATCAGAAAATTCATAATGAAAAAAATGCAA | |
| | ATCAGAAAATTCATATTAAGGAGAAAAGATATGAATGTAGAGAATGTGGGAAAGCCTT | |
| | TCACCAGAGTACGCACCTTATCCATCACCAAAGAATTCACACTGGCGAGAAACCCTAT | |
| | GAATGTAAGGAATGTGGCAAGGCCTTCTCAGTGAGCTCCTCACTTACGTACCATCAGA | |
| | AAATTCATACTGGAGAGAAGCCTTTTGAATGCAACTTATGTGGAAAAGCTTTTATCCG | |
| | AAATATACACCTTGCCCATCATCATAGAATACATACTGGAGAGAAACCTTTTAAATGT | |
| | AACATTTGTGAAAAAGCCTTTGTGTGCAGGGCACACCTTACCAAACACCAGAATATCC | |
| | ACAGTGGAGAGAAACCCTATAAATGCAATGAATGTGGAAAAGCCTTTAATCAGAGTAC | |
| | AAGTTTCCTTCAGCATCAGAGAATTCACACTGGAGAGAAACCCTTTGAATGTAATGAA | |
| | TGTGGGAAGGCCTTCAGGGTGAACTCTTCCCTTACTGAACATCAGAGAATTCATACTG | |
| | GAGAGAAACCTTATAAATGTAATGAATGTGGGAAAGCTTTCAGGGATAATTCATCCTT | |
| | TGCACGACATCGGAAAATTCACACTGGAGAGAAACCTTACAGATGTGGCTTGTGTGAG | |
| | AAAGCCTTTCGGGACCAATCAGCACTAGCCCAACATCAGAGAATTCATACTGGGGAAA | |
| | AACCTTATACATGTAACATATGTGAAAAAGCCTTCAGTGACCATTCAGCCCTTACCCA | |
| | ACATAAGAGAATTCATACTAGGGAAAAACCTTACAAATGTAAAATCTGTGAGAAAGCC | |
| | TTTATCCGAAGCACTCACCTGACTCAACATCAGAGGATTCACACAGGAGAGAAACCCT | |
| | ATAAATGTAATAAATGTGGGAAAGCTTTTAACCAGACTGCAAACCTCATTCAGCATCA | |
| | GAGACATCATATTGGAGAGAAGTGA | |
| ALK- | ATGGAGCAGTCGCCGCCGCCGGCGCCCGAGCCGACCCAAGGGCCGACCCCCGCAAGGA | 28 |
| TTC28 | GCCGAAGGCGGCGGGAGCCAGAGTCGCCGCCGGCGTCGGCGCCGACAAACCAGTTAAT | |
| | CCAGAAAGTCTGCATTGGAGAGAACAATGTGATAGAAGAAGAAATCCGTGTGAACAGA | |
| | AGCGTGCATGAGTGGGCAGGAGGCGGAGGAGGAGGGGGTGGAGCCACCTACGTATTTA | |
| | AGATGAAGGATGGAGTGCCGGTGCCCCTGATCATTGCAGCCGGAGGTGGTGGCAGGGC | |
| | CTACGGGGCCAAGACAGACACGTTCCACCCAGAGAGACTGGAGAATAACTCCTCGGTT | |
| | CTAGGGCTAAACGGCAATTCCGGAGCCGCAGGTGGTGGAGGTGGCTGGAATGATAACA | |
| | CTTCCTTGCTCTGGGCCGGAAAATCTTTGCAGGAGGGTGCCACCGGAGGACATTCCTG | |
| | CCCCCAGGCCATGAAGAAGTGGGGGTGGGAGACAAGAGGGGGTTTCGGAGGGGGTGGA | |
| | GGGGGGTGCTCCTCAGGTGGAGGAGGCGGAGGATATATAGGCGGCAATGCAGCCTCAA | |
| | ACAATGACCCCGAAATGGATGGGGAAGATGGGGTTTCCTTCATCAGTCCACTGGGCAT | |
| | CCTGTACACCCCAGCTTTAAAAGTGATGGAAGGCCACGGGGAAGTGAATATTAAGCAT | |
| | TATCTAAACTGCAGTCACTGTGAGGTAGACGAATGTCACATGGACCCTGAAAGCCACA | |
| | AGGTCATCTGCTTCTGTGACCACGGGACGGTGCTGGCTGAGGATGGCGTCTCCTGCAT | |
| | TGTGTCACCCACCCCGGAGCCACACCTGCCACTCTCGCTGATCCTCTCTGTGGTGACC | |
| | TCTGCCCTCGTGGCCGCCCTGGTCCTGGCTTTCTCCGGCATCATGATTGTGTACCGCC | |
| | GGAAGCACCAGGAGCTGCAAGCCATGCAGATGGAGCTGCAGAGCCCTGAGTACAAGCT | |
| | GAGCAAGCTCCGCACCTCGACCATCATGACCGACTACAACCCCAACTACTGCTTTGCT | |
| | GGCAAGACCTCCTCCATCAGTGACCTGAAGGAGGTGCCGCGGAAAAACATCACCCTCA | |
| | TTCGGGGTCTGGGCCATGGCGCCTTTGGGGAGGTGTATGAAGGCCAGGTGTCCGGAAT | |
| | GCCCAACGACCCAAGCCCCCTGCAAGTGGCTGTGAAGACGCTGCCTGAAGTGTGCTCT | |
| | GAACAGGACGAACTGGATTTCCTCATGGAAGCCCTGATCATCAGCAAATTCAACCACC | |
| | AGAACATTGTTCGCTGCATTGGGGTGAGCCTGCAATCCCTGCCCCGGTTCATCCTGCT | |
| | GGAGCTCATGGCGGGGGGAGACCTCAAGTCCTTCCTCCGAGAGACCCGCCCTCGCCCG | |
| | AGCCAGCCCTCCTCCCTGGCCATGCTGGACCTTCTGCACGTGGCTCGGGACATTGCCT | |
| | GTGGCTGTCAGTATTTGGAGGAAAACCACTTCATCCACCGAGACATTGCTGCCAGAAA | |
| | CTGCCTCTTGACCTGTCCAGGCCCTGGAAGAGTGGCCAAGATTGGAGACTTCGGGATG | |
| | GCCCGAGACATCTACAGGGCGAGCTACTATAGAAAGGGAGGCTGTGCCATGCTGCCAG | |
| | TTAAGTGGATGCCCCCAGAGGCCTTCATGGAAGGAATATTCACTTCTAAAACAGACAC | |
| | ATGGTCCTTTGGAGTGCTGCTATGGGAAATCTTTTCTCTTGGATATATGCCATACCCC | |
| | AGCAAAAGCAACCAGGAAGTTCTGGAGTTTGTCACCAGTGGAGGCCGGATGGACCCAC | |
| | CCAAGAACTGCCCTGGGCCTGTATACCGGATAATGACTCAGTGCTGGCAACATCAGCC | |
| | TGAAGACAGGCCCAACTTTGCCATCATTTTGGAGAGGATTGAATACTGCACCCAGGAC | |
| | CCGGATGTAATCAACACCGCTTTGCCGATAGAATATGGTCCACTTGTGGAAGAGGAAG | |
| | AGAAAGTGCCTGTGAGGCCCAAGGACCCTGAGGGGGTTCCTCCTCTCCTGGTCTCTCA | |
| | ACAGGCAAAACGGGAGGAGGAGCGCAGCCCAGCTGCCCCACCACCTCTGCCTACCACC | |
| | TCCTCTGGCAAGGCTGCAAAGAAACCCACAGCTGCAGAGATCTCTGTTCGAGTCCCTA | |
| | GAGGGCCGGCCGTGGAAGGGGGACACGTGAATATGGCATTCTCTCAGTCCAACCCTCC | |
| | TTCGGAGTTGCACAAGGTCCACGGATCCAGAAACAAGCCCACCAGCTTGTGGAACCCA | |
| | ACGTACGGCTCCTGGTTTACAGAGAAACCCACCAAAAAGAATAATCCTATAGCAAAGA | |
| | AGGAGCCACACGACAGGGGTAACCTGGGGCTGGAGGGAAGCTGTACTGTCCCACCTAA | |
| | CGTTGCAACTGGGAGACTTCCGGGGGCCTCACTGCTCCTAGAGCCCTCTTCGCTGACT | |
| | GCCAATATGAAGGAGGTACCTCTGTTCAGGCTACGTCACTTCCCTTGTGGGAATGTCA | |
| | ATTACGGCTACCAGCAACAGGGCTTGCCCTTAGAAGCCGCTACTGCCCCTGGAGCTGG | |
| | TCATTACGAGGATACCATTCTGAAAAGCAAGAATAGCATGAACCAGCCTGGGCCCTGA | |
| ALK-NINJ2 | ATGGAATCAGCAAGAGAAAACATCGACCTTCAAACAAACCAGTTAATCCAGAAAGTCT | 29 |
| | GCATTGGAGAGAACAATGTGATAGAAGAAGAAATCCGTGTGAACAGAAGCGTGCATGA | |
| | GTGGGCAGGAGGCGGAGGAGGAGGGGGTGGAGCCACCTACGTATTTAAGATGAAGGAT | |
| | GGAGTGCCGGTGCCCCTGATCATTGCAGCCGGAGGTGGTGGCAGGGCCTACGGGGCCA | |
| | AGACAGACACGTTCCACCCAGAGAGACTGGAGAATAACTCCTCGGTTCTAGGGCTAAA | |
| | CGGCAATTCCGGAGCCGCAGGTGGTGGAGGTGGCTGGAATGATAACACTTCCTTGCTC | |
| | TGGGCCGGAAAATCTTTGCAGGAGGGTGCCACCGGAGGACATTCCTGCCCCCAGGCCA | |
| | TGAAGAAGTGGGGGTGGGAGACAAGAGGGGGTTTCGGAGGGGGTGGAGGGGGGTGCTC | |
| | CTCAGGTGGAGGAGGCGGAGGATATATAGGCGGCAATGCAGCCTCAAACAATGACCCC | |
| | GAAATGGATGGGGAAGATGGGGTTTCCTTCATCAGTCCACTGGGCATCCTGTACACCC | |
| | CAGCTTTAAAAGTGATGGAAGGCCACGGGGAAGTGAATATTAAGCATTATCTAAACTG | |
| | CAGTCACTGTGAGGTAGACGAATGTCACATGGACCCTGAAAGCCACAAGGTCATCTGC | |
| | TTCTGTGACCACGGGACGGTGCTGGCTGAGGATGGCGTCTCCTGCATTGTGTCACCCA | |
| | CCCCGGAGCCACACCTGCCACTCTCGCTGATCCTCTCTGTGGTGACCTCTGCCCTCGT | |
| | GGCCGCCCTGGTCCTGGCTTTCTCCGGCATCATGATTGTGTACCGCCGGAAGCACCAG | |
| | GAGCTGCAAGCCATGCAGATGGAGCTGCAGAGCCCTGAGTACAAGCTGAGCAAGCTCC | |
| | GCACCTCGACCATCATGACCGACTACAACCCCAACTACTGCTTTGCTGGCAAGACCTC | |
| | CTCCATCAGTGACCTGAAGGAGGTGCCGCGGAAAAACATCACCCTCATTCGGGGTCTG | |
| | GGCCATGGCGCCTTTGGGGAGGTGTATGAAGGCCAGGTGTCCGGAATGCCCAACGACC | |
| | CAAGCCCCCTGCAAGTGGCTGTGAAGACGCTGCCTGAAGTGTGCTCTGAACAGGACGA | |
| | ACTGGATTTCCTCATGGAAGCCCTGATCATCAGCAAATTCAACCACCAGAACATTGTT | |
| | CGCTGCATTGGGGTGAGCCTGCAATCCCTGCCCCGGTTCATCCTGCTGGAGCTCATGG | |
| | CGGGGGGAGACCTCAAGTCCTTCCTCCGAGAGACCCGCCCTCGCCCGAGCCAGCCCTC | |
| | CTCCCTGGCCATGCTGGACCTTCTGCACGTGGCTCGGGACATTGCCTGTGGCTGTCAG | |
| | TATTTGGAGGAAAACCACTTCATCCACCGAGACATTGCTGCCAGAAACTGCCTCTTGA | |
| | CCTGTCCAGGCCCTGGAAGAGTGGCCAAGATTGGAGACTTCGGGATGGCCCGAGACAT | |
| | CTACAGGGCGAGCTACTATAGAAAGGGAGGCTGTGCCATGCTGCCAGTTAAGTGGATG | |
| | CCCCCAGAGGCCTTCATGGAAGGAATATTCACTTCTAAAACAGACACATGGTCCTTTG | |
| | GAGTGCTGCTATGGGAAATCTTTTCTCTTGGATATATGCCATACCCCAGCAAAAGCAA | |
| | CCAGGAAGTTCTGGAGTTTGTCACCAGTGGAGGCCGGATGGACCCACCCAAGAACTGC | |
| | CCTGGGCCTGTATACCGGATAATGACTCAGTGCTGGCAACATCAGCCTGAAGACAGGC | |
| | CCAACTTTGCCATCATTTTGGAGAGGATTGAATACTGCACCCAGGACCCGGATGTAAT | |
| | CAACACCGCTTTGCCGATAGAATATGGTCCACTTGTGGAAGAGGAAGAGAAAGTGCCT | |
| | GTGAGGCCCAAGGACCCTGAGGGGGTTCCTCCTCTCCTGGTCTCTCAACAGGCAAAAC | |
| | GGGAGGAGGAGCGCAGCCCAGCTGCCCCACCACCTCTGCCTACCACCTCCTCTGGCAA | |
| | GGCTGCAAAGAAACCCACAGCTGCAGAGATCTCTGTTCGAGTCCCTAGAGGGCCGGCC | |
| | GTGGAAGGGGGACACGTGAATATGGCATTCTCTCAGTCCAACCCTCCTTCGGAGTTGC | |
| | ACAAGGTCCACGGATCCAGAAACAAGCCCACCAGCTTGTGGAACCCAACGTACGGCTC | |
| | CTGGTTTACAGAGAAACCCACCAAAAAGAATAATCCTATAGCAAAGAAGGAGCCACAC | |
| | GACAGGGGTAACCTGGGGCTGGAGGGAAGCTGTACTGTCCCACCTAACGTTGCAACTG | |
| | GGAGACTTCCGGGGGCCTCACTGCTCCTAGAGCCCTCTTCGCTGACTGCCAATATGAA | |
| | GGAGGTACCTCTGTTCAGGCTACGTCACTTCCCTTGTGGGAATGTCAATTACGGCTAC | |
| | CAGCAACAGGGCTTGCCCTTAGAAGCCGCTACTGCCCCTGGAGCTGGTCATTACGAGG | |
| | ATACCATTCTGAAAAGCAAGAATAGCATGAACCAGCCTGGGCCCTGA | |
| ALK-UTRN | ATGGCCAAGTATGGAGAACATGAAGCCAGTCCTGACAATGGGCAGAACGAATTCAGTG | 30 |
| | ATATCATTAAGTCCAGATCTGATGAACACAATGACGTACAGAAGAAAACCTTTACCAA | |
| | ATGGATAAATGCTCGATTTTCAAAGAGTGGGAAACCACCCATCAATGATATGTTCACA | |
| | GACCTCAAAGATGGAAGGAAGCTATTGGATCTTCTAGAAGGCCTCACAGGAACATCAC | |
| | TGCCAAAGGAACGTGGTTCCACAAGGGTACATGCCTTAAATAACGTCAACAGAGTGCT | |
| | GCAGGTTTTACATCAGAACAATGTGGAATTAGTGAATATAGGGGGAACTGACATTGTG | |
| | GATGGAAATCACAAACTGACTTTGGGGTTACTTTGGAGCATCATTTTGCACTGGCAGG | |
| | TGAAAGATGTCATGAAGGATGTCATGTCGGACCTGCAGCAGACGAACAGTGAGAAGAT | |
| | CCTGCTCAGCTGGGTGCGTCAGACCACCAGGCCCTACAGCCAAGTCAACGTCCTCAAC | |
| | TTCACCACCAGCTGGACAGATGGACTCGCCTTTAATGCTGTCCTCCACCGACATAAAC | |
| | CTGATCTCTTCAGCTGGGATAAAGTTGTCAAAATGTCACCAATTGAGAGACTTGAACA | |
| | TGCCTTCAGCAAGGCTCAAACTTATTTGGGAATTGAAAAGCTGTTAGATCCTGAAGAT | |
| | GTTGCCGTTCAGCTTCCTGACAAGAAATCCATAATTATGTATTTAACATCTTTGTTTG | |
| | AGGTGCTACCTCAGCAAGTCACCATAGACGCCATCCGTGAGGTAGAGACACTCCCAAG | |
| | GAAATATAAAAAAGAATGTGAAGAAGAGGCAATTAATATACAGAGTACAGCGCCTGAG | |
| | GAGGAGCATGAGAGTCCCCGAGCTGAAACTCCCAGCACTGTCACTGAGGTTGACATGG | |
| | ATCTGGACAGCTATCAGATTGCGTTGGAGGAAGTGCTGACCTGGTTGCTTTCTGCTGA | |
| | GGACACTTTCCAGGAGCAGGATGATATTTCTGATGATGTTGAAGAAGTCAAAGACCAG | |
| | TTTGCAACCCATGAAGCTTTTATGATGGAACTGACTGCACACCAGAGCAGTGTGGGCA | |
| | GCGTCCTGCAGGCAGGCAACCAACTGATAACACAAGGAACTCTGTCAGACGAAGAAGA | |
| | ATTTGAGATTCAGGAACAGATGACCCTGCTGAATGCTAGATGGGAGGCTCTTAGGGTG | |
| | GAGAGTATGGACAGACAGTCCCGGCTGCACGATGTGCTGATGGAACTGCAGAAGAAGC | |
| | AACTGCAGCAGCTCTCCGCCTGGTTAACACTCACAGAGGAGCGCATTCAGAAGATGGA | |
| | AACTTGCCCCCTGGATGATGATGTAAAATCTCTACAAAAGCTGCTAGAAGAACATAAA | |
| | AGTTTGCAAAGTGATCTTGAGGCTGAACAGGTGAAAGTAAATTCACTAACTCACATGG | |
| | TGGTCATTGTTGATGAAAACAGTGGTGAGAGTGCTACAGCTATCCTAGAAGACCAGTT | |
| | ACAGAAACTTGGTGAGCGCTGGACAGCAGTATGCCGTTGGACTGAAGAACGCTGGAAT | |
| | AGGTTACAAGAAATCAATATATTGTGGCAGGAATTATTGGAAGAACAGTGCTTGTTGA | |
| | AAGCTTGGTTAACCGAAAAAGAAGAGGCTTTAAATAAAGTCCAGACAAGCAACTTCAA | |
| | AGACCAAAAGGAACTAAGTGTCAGTGTTCGACGTCTGGCTATTTTGAAGGAAGACATG | |
| | GAAATGAAGCGTCAAACATTGGATCAGCTGAGTGAGATTGGCCAGGATGTGGGACAAT | |
| | TACTTGATAATTCCAAGGCATCTAAGAAGATCAACAGTGACTCAGAGGAACTGACTCA | |
| | AAGATGGGATTCTTTGGTTCAGAGACTAGAAGATTCCTCCAACCAGGTGACTCAGGCT | |
| | GTAGCAAAGCTGGGGATGTCTCAGATTCCTCAGAAGGACCTTTTGGAGACTGTTCGTG | |
| | TAAGAGAACAAGCAATTACAAAAAAATCTAAGCAGGAACTGCCTCCTCCTCCTCCCCC | |
| | AAAGAAGAGACAGATCCATGTGGATATTGAAGCTAAGAAAAAGTTTGATGCTATAAGT | |
| | GCAGAGCTGTTGAACTGGATTTTGAAATGGAAAACTGCCATTCAGACCACAGAGATAA | |
| | AAGAGTATATGAAGATGCAAGACACTTCCGAAATGAAAAAGAAGTTGAAGGCATTAGA | |
| | AAAAGAACAGAGAGAAAGAATCCCCAGAGCAGATGAATTAAACCAAACTGGACAAATC | |
| | CTTGTGGAGCAAATGGGAAAAGAAGGCCTTCCTACTGAAGAAATAAAAAATGTTCTGG | |
| | AGAAGGTTTCATCAGAATGGAAGAATGTATCTCAACATTTGGAAGATCTAGAAAGAAA | |
| | GATTCAGCTACAGGAAGATATAAATGCTTATTTCAAGCAGCTTGATGAGCTTGAAAAG | |
| | GTCATCAAGACAAAGGAGGAGTGGGTAAAACACACTTCCATTTCTGAATCTTCCCGGC | |
| | AGTCCTTGCCAAGCTTGAAGGATTCCTGTCAGCGGGAATTGACAAATCTTCTTGGCCT | |
| | TCACCCCAAAATTGAAATGGCTCGTGCAAGCTGCTCGGCCCTGATGTCTCAGCCTTCT | |
| | GCCCCAGATTTTGTCCAGCGGGGCTTCGATAGCTTTCTGGGCCGCTACCAAGCTGTAC | |
| | AAGAGGCTGTAGAGGATCGTCAACAACATCTAGAGAATGAACTGAAGGGCCAACCTGG | |
| | ACATGCATATCTGGAAACATTGAAAACACTGAAAGATGTGCTAAATGATTCAGAAAAT | |
| | AAGGCCCAGGTGTCTCTGAATGTCCTTAATGATCTTGCCAAGGTGGAGAAGGCCCTGC | |
| | AAGAAAAAAAGACCCTTGATGAAATCCTTGAGAATCAGAAACCTGCATTACATAAACT | |
| | TGCAGAAGAAACAAAGGCTCTGGAGAAAAATGTTCATCCTGATGTAGAAAAATTATAT | |
| | AAGCAAGAATTTGATGATGTGCAAGGAAAGTGGAACAAGCTAAAGGTCTTGGTTTCCA | |
| | AAGATCTACATTTGCTTGAGGAAATTGCTCTCACACTCAGAGCTTTTGAGGCCGATTC | |
| | AACAGTCATTGAGAAGTGGATGGATGGCGTGAAAGACTTCTTAATGAAACAGCAGGCT | |
| | GCCCAAGGAGACGACGCAGGTCTACAGAGGCAGTTAGACCAGTGCTCTGCATTTGTTA | |
| | ATGAAATAGAAACAATTGAATCATCTCTGAAAAACATGAAGGAAATAGAGACTAATCT | |
| | TCGAAGTGGTCCAGTTGCTGGAATAAAAACTTGGGTGCAGACAAGACTAGGTGACTAC | |
| | CAAACTCAACTGGAGAAACTTAGCAAGGAGATCGCTACTCAAAAAAGTAGGTTGTCTG | |
| | AAAGTCAAGAAAAAGCTGCGAACCTGAAGAAAGACTTGGCAGAGATGCAGGAATGGAT | |
| | GACCCAGGCCGAGGAAGAATATTTGGAGCGGGATTTTGAGTACAAGTCACCAGAAGAG | |
| | CTTGAGAGTGCTGTGGAAGAGATGAAGAGGGCAAAAGAGGATGTGTTGCAGAAGGAGG | |
| | TGAGAGTGAAGATTCTCAAGGACAACATCAAGTTATTAGCTGCCAAGGTGCCCTCTGG | |
| | TGGCCAGGAGTTGACGTCTGAGCTGAATGTTGTGCTGGAGAATTACCAACTTCTTTGT | |
| | AATAGAATTCGAGGAAAGTGCCACACGCTAGAGGAGGTCTGGTCTTGTTGGATTGAAC | |
| | TGCTTCACTATTTGGATCTTGAAACTACCTGGTTAAACACTTTGGAAGAGCGGATGAA | |
| | GAGCACAGAGGTCCTGCCTGAGAAGACGGATGCTGTCAACGAAGCCCTGGAGTCTCTG | |
| | GAATCTGTTCTGCGCCACCCGGCAGATAATCGCACCCAGATTCGAGAGCTTGGCCAGA | |
| | CTCTGATTGATGGGGGGATCCTGGATGATATAATCAGTGAGAAACTGGAGGCTTTCAA | |
| | CAGCCGATATGAAGATCTAAGTCACCTGGCAGAGAGCAAGCAGATTTCTTTGGAAAAG | |
| | CAACTCCAGGTGCTGCGGGAAACTGACCAGATGCTTCAAGTCTTGCAAGAGAGCTTGG | |
| | GGGAGCTGGACAAACAGCTCACCACATACCTGACTGACAGGATAGATGCTTTCCAAGT | |
| | TCCACAGGAAGCTCAGAAAATCCAAGCAGAGATCTCAGCCCATGAGCTAACCCTAGAG | |
| | GAGTTGAGAAGAAATATGCGTTCTCAGCCCCTGACCTCCCCAGAGAGTAGGACTGCCA | |
| | GAGGAGGAAGTCAGATGGATGTGCTACAGAGGAAACTCCGAGAGGTGTCCACAAAGTT | |
| | CCAGCTTTTCCAGAAGCCAGCTAACTTCGAGCAGCGCATGCTGGACTGCAAGCGTGTG | |
| | CTGGATGGCGTGAAAGCAGAACTTCACGTTCTGGATGTGAAGGACGTAGACCCTGACG | |
| | TCATACAGACGCACCTGGACAAGTGTATGAAACTGTATAAAACTTTGAGTGAAGTCAA | |
| | ACTTGAAGTGGAAACTGTGATTAAAACAGGAAGACATATTGTCCAGAAACAGCAAACG | |
| | GACAACCCAAAAGGGATGGATGAGCAGCTGACTTCCCTGAAGGTTCTTTACAATGACC | |
| | TGGGCGCACAGGTGACAGAAGGAAAACAGGATCTGGAAAGAGCATCACAGTTGGCCCG | |
| | GAAAATGAAGAAAGAGGCTGCTTCTCTCTCTGAATGGCTTTCTGCTACTGAAACTGAA | |
| | TTGGTACAGAAGTCCACTTCAGAAGGTCTGCTTGGTGACTTGGATACAGAAATTTCCT | |
| | GGGCTAAAAATGTTCTGAAGGATCTGGAAAAGAGAAAAGCTGATTTAAATACCATCAC | |
| | AGAGAGTAGTGCTGCCCTGCAAAACTTGATTGAGGGCAGTGAGCCTATTTTAGAAGAG | |
| | AGGCTCTGCGTCCTTAACGCTGGGTGGAGCCGAGTTCGTACCTGGACTGAAGATTGGT | |
| | GCAATACCTTGATGAACCATCAGAACCAGCTAGAAATATTTGATGGGAACGTGGCTCA | |
| | CATAAGTACCTGGCTTTATCAAGCTGAAGCTCTATTGGATGAAATTGAAAAGAAACCA | |
| | ACAAGTAAACAGGAAGAAATTGTGAAGCGTTTAGTATCTGAGCTGGATGATGCCAACC | |
| | TCCAGGTTGAAAATGTCCGCGATCAAGCCCTTATTTTGATGAATGCCCGTGGAAGCTC | |
| | AAGCAGGGAGCTTGTAGAACCAAAGTTAGCTGAGCTGAATAGGAACTTTGAAAAGGTG | |
| | TCTCAACATATCAAAAGTGCCAAATTGCTAATTGCTCAGGAACCATTATACCAATGTT | |
| | TGGTCACCACTGAAACATTTGAAACTGGTGTGCCTTTCTCTGACTTGGAAAAATTAGA | |
| | AAATGACATAGAAAATATGTTAAAATTTGTGGAAAAACACTTGGAATCCAGTGATGAA | |
| | GATGAAAAGATGGATGAGGAGAGTGCCCAGATTGAGGAAGTTCTACAAAGAGGAGAAG | |
| | AAATGTTACATCAACCTATGGAAGATAATAAAAAAGAAAAGATCCGTTTGCAATTATT | |
| | ACTTTTGCATACTAGATACAACAAAATTAAGGCAATCCCTATTCAACAGAGGAAAATG | |
| | GGTCAACTTGCTTCTGGAATTAGATCATCACTTCTTCCTACAGATTATCTGGTTGAAA | |
| | TTAACAAAATTTTACTTTGCATGGATGATGTTGAATTATCGCTTAATGTTCCAGAGCT | |
| | CAACACTGCTATTTACGAAGACTTCTCTTTTCAGGAAGACTCTCTGAAGAATATCAAA | |
| | GACCAACTGGACAAACTTGGAGAGCAGATTGCAGTCATTCATGAAAAACAGCCAGATG | |
| | TCATCCTTGAAGCCTCTGGACCTGAAGCCATTCAGATCAGAGATACACTTACTCAGCT | |
| | GAATGCAAAATGGGACAGAATTAATAGAATGTACAGTGATCGGAAAGGTTGTTTTGAC | |
| | AGGGCAATGGAAGAATGGAGACAGTTCCATTGTGACCTTAATGACCTCACACAGTGGA | |
| | TAACAGAGGCTGAAGAATTACTGGTTGATACCTGTGCTCCAGGTGGCAGCCTGGACTT | |
| | AGAGAAAGCCAGGATACATCAGCAGGAACTTGAGGTGGGCATCAGCAGCCACCAGCCC | |
| | AGTTTTGCAGCACTAAACCGAACTGGGGATGGGATTGTGCAGAAACTCTCCCAGGCAG | |
| | ATGGAAGCTTCTTGAAAGAAAAACTGGCAGGTTTAAACCAACGCTGGGATGCAATTGT | |
| | TGCAGAAGTGAAGGATAGGCAGCCAAGGCTAAAAGGAGAAAGTAAGCAGGTGATGAAG | |
| | TACAGGCATCAGCTAGATGAGATTATCTGTTGGTTAACAAAGGCTGAGCATGCTATGC | |
| | AAAAGAGATCAACCACCGAATTGGGAGAAAACCTGCAAGAATTAAGAGACTTAACTCA | |
| | AGAAATGGAAGTACATGCTGAAAAACTCAAATGGCTGAATAGAACTGAATTGGAGATG | |
| | CTTTCAGATAAAAGTCTGAGTTTACCTGAAAGGGATAAAATTTCAGAAAGCTTAAGGA | |
| | CTGTAAATATGACATGGAATAAGATTTGCAGAGAGGTGCCTACCACCCTGAAGGAATG | |
| | CATCCAGGAGCCCAGTTCTGTTTCACAGACAAGGATTGCTGCTCATCCTAATGTCCAA | |
| | AAGGTGGTGCTAGTATCATCTGCGTCAGATATTCCTGTTCAGTCTCATCGTACTTCGG | |
| | AAATTTCAATTCCTGCTGATCTTGATAAAACTATAACAGAACTAGCCGACTGGCTGGT | |
| | ATTAATCGACCAGATGCTGAAGTCCAACATTGTCACTGTTGGGGATGTAGAAGAGATC | |
| | AATAAGACCGTTTCCCGAATGAAAATTACAAAGGCTGACTTAGAACAGCGCCATCCTC | |
| | AGCTGGATTATGTTTTTACATTGGCACAGAATTTGAAAAATAAAGCTTCCAGTTCAGA | |
| | TATGAGAACAGCAATTACAGAAAAATTGGAAAGGGTCAAGAACCAGTGGGATGGCACC | |
| | CAGCATGGCGTTGAGCTAAGACAGCAGCAGCTTGAGGACATGATTATTGACAGTCTTC | |
| | AGTGGGATGACCATAGGGAGGAGACTGAAGAACTGATGAGAAAATATGAGGCTCGACT | |
| | CTATATTCTTCAGCAAGCCCGACGGGATCCACTCACCAAACAAATTTCTGATAACCAA | |
| | ATACTGCTTCAAGAACTGGGTCCTGGAGATGGTATCGTCATGGCGTTCGATAACGTCC | |
| | TGCAGAAACTCCTGGAGGAATATGGGAGTGATGACACAAGGAATGTGAAAGAAACCAC | |
| | AGAGTACTTAAAAACATCATGGATCAATCTCAAACAAAGTATTGCTGACAGACAGAAC | |
| | GCCTTGGAGGCTGAGTGGAGGACGGTGCAGGCCTCTCGCAGAGATCTGGAAAACTTCC | |
| | TGAAGTGGATCCAAGAAGCAGAGACCACAGTGAATGTGCTTGTGGATGCCTCTCATCG | |
| | GGAGAATGCTCTTCAGGATAGTATCTTGGCCAGGGAACTCAAACAGCAGATGCAGGAC | |
| | ATCCAGGCAGAAATTGATGCCCACAATGACATATTTAAAAGCATTGACGGAAACAGGC | |
| | AGAAGATGGTAAAAGCTTTGGGAAATTCTGAAGAGGCTACTATGCTTCAACATCGACT | |
| | GGATGATATGAACCAAAGATGGAATGACTTAAAAGCAAAATCTGCTAGCATCAGGGCC | |
| | CATTTGGAGGCCAGCGCTGAGAAGTGGAACAGGTTGCTGATGTCCTTAGAAGAACTGA | |
| | TCAAATGGCTGAATATGAAAGATGAAGAGCTTAAGAAACAAATGCCTATTGGAGGAGA | |
| | TGTTCCAGCCTTACAGCTCCAGTATGACCATTGTAAGGCCCTGAGACGGGAGTTAAAG | |
| | GAGAAAGAATATTCTGTCCTGAATGCTGTCGACCAGGCCCGAGTTTTCTTGGCTGATC | |
| | AGCCAATTGAGGCCCCTGAAGAGCCAAGAAGAAACCTACAATCAAAAACAGAATTAAC | |
| | TCCTGAGGAGAGAGCCCAAAAGATTGCCAAAGCCATGCGCAAACAGTCTTCTGAAGTC | |
| | AAAGAAAAATGGGAAAGTCTAAATGCTGTAACTAGCAATTGGCAAAAGCAAGTGGACA | |
| | AGGCATTGGAGAAACTCAGAGACCTGCAGGGAGCTATGGATGACCTGGACGCTGACAT | |
| | GAAGGAGGCAGAGTCCGTGCGGAATGGCTGGAAGCCCGTGGGAGACTTACTCATTGAC | |
| | TCGCTGCAGGATCACATTGAAAAAATCATGGCATTTAGAGAAGAAATTGCACCAATCA | |
| | ACTTTAAAGTTAAAACGGTGAATGATTTATCCAGTCAGCTGTCTCCACTTGACCTGCA | |
| | TCCCTCTCTAAAGATGTCTCGCCAGCTAGATGACCTTAATATGCGATGGAAACTTTTA | |
| | CAGGTTTCTGTGGATGATCGCCTTAAACAGCTTCAGGAAGCCCACAGAGATTTTGGAC | |
| | CATCCTCTCAGCATTTTCTCTCTACGTCAGTCCAGCTGCCGTGGCAAAGATCCATTTC | |
| | ACATAATAAAGTGCCCTATTACATCAACCATCAAACACAGACCACCTGTTGGGACCAT | |
| | CCTAAAATGACCGAACTCTTTCAATCCCTTGCTGACCTGAATAATGTACGTTTTTCTG | |
| | CCTACCGTACAGCAATCAAAATCCGAAGACTACAAAAAGCACTATGTTTGGATCTCTT | |
| | AGAGTTGAGTACAACAAATGAAATTTTCAAACAGCACAAGTTGAACCAAAATGACCAG | |
| | CTCCTCAGTGTTCCAGATGTCATCAACTGTCTGACAACAACTTATGATGGACTTGAGC | |
| | AAATGCATAAGGACCTGGTCAACGTTCCACTCTGTGTTGATATGTGTCTCAATTGGTT | |
| | GCTCAATGTCTATGACACGGGTCGAACTGGAAAAATTAGAGTGCAGAGTCTGAAGATT | |
| | GGATTAATGTCTCTCTCCAAAGGTCTCTTGGAAGAAAAATACAGATATCTCTTTAAGG | |
| | AAGTTGCAGGGCCAACAGAAATGTGTGACCAGAGGCAGCTGGGCCTGTTACTTCATGA | |
| | TGCCATCCAGATCCCCCGGCAGCTAGGTGAAGTAGCAGCTTTTGGAGGCAGTAATATT | |
| | GAGCCTAGTGTTCGCAGCTGCTTCCAACAGAATAACAATAAACCAGAAATAAGTGTGA | |
| | AAGAGTTTATAGATTGGATGCATTTGGAACCACAGTCCATGGTTTGGCTCCCAGTTTT | |
| | ACATCGAGTGGCAGCAGCGGAGACTGCAAAACATCAGGCCAAATGCAACATCTGTAAA | |
| | GAATGTCCAATTGTCGGGTTCAGGTATAGAAGCCTTAAGCATTTTAACTATGATGTCT | |
| | GCCAGAGTTGTTTCTTTTCGGGTCGAACAGCAAAAGGTCACAAATTACATTACCCAAT | |
| | GGTGGAATATTGTATACCTACAACATCTGGGGAAGATGTACGAGACTTCACAAAGGTA | |
| | CTTAAGAACAAGTTCAGGTCGAAGAAGTACTTTGCCAAACACCCTCGACTTGGTTACC | |
| | TGCCTGTCCAGACAGTTCTTGAAGGTGACAACTTAGAGACTCCTATCACACTCATCAG | |
| | TATGTGGCCAGAGCACTATGACCCCTCACAATCTCCTCAACTGTTTCATGATGACACC | |
| | CATTCAAGAATAGAACAATATGCCACACGACTGGCCCAGATGGAAAGGACTAATGGGT | |
| | CTTTTCTCACTGATAGCAGCTCCACCACAGGAAGTGTGGAAGACGAGCACGCCCTCAT | |
| | CCAGCAGTATTGCCAAACACTCGGAGGAGAGTCCCCAGTGAGCCAGCCGCAGAGCCCA | |
| | GCTCAGATCCTGAAGTCAGTAGAGAGGGAAGAACGTGGAGAACTGGAGAGGATCATTG | |
| | CTGACCTGGAGGAAGAACAAAGAAATCTACAGGTGGAGTATGAGCAGCTGAAGGACCA | |
| | GCACCTCCGAAGGGGGCTCCCTGTCGGTTCACCGCCAGAGTCGATTATATCTCCCCAT | |
| | CACACGTCTGAGGATTCAGAACTTATAGCAGAAGCAAAACTCCTCAGGCAGCACAAAG | |
| | GTCGGCTGGAGGCTAGGATGCAGATTTTAGAAGATCACAATAAACAGCTGGAGTCTCA | |
| | GCTCCACCGCCTCCGACAGCTGCTGGAGCAGCCTGAATCTGATTCCCGAATCAATGGT | |
| | GTTTCCCCATGGGCTTCTCCTCAGCATTCTGCACTGAGCTACTCGCTTGATCCAGATG | |
| | CCTCCGGCCCACAGTTCCACCAGGCAGTGTCACCCACCCCGGAGCCACACCTGCCACT | |
| | CTCGCTGATCCTCTCTGTGGTGACCTCTGCCCTCGTGGCCGCCCTGGTCCTGGCTTTC | |
| | TCCGGCATCATGATTGTGTACCGCCGGAAGCACCAGGAGCTGCAAGCCATGCAGATGG | |
| | AGCTGCAGAGCCCTGAGTACAAGCTGAGCAAGCTCCGCACCTCGACCATCATGACCGA | |
| | CTACAACCCCAACTACTGCTTTGCTGGCAAGACCTCCTCCATCAGTGACCTGAAGGAG | |
| | GTGCCGCGGAAAAACATCACCCTCATTCGGGGTCTGGGCCATGGCGCCTTTGGGGAGG | |
| | TGTATGAAGGCCAGGTGTCCGGAATGCCCAACGACCCAAGCCCCCTGCAAGTGGCTGT | |
| | GAAGACGCTGCCTGAAGTGTGCTCTGAACAGGACGAACTGGATTTCCTCATGGAAGCC | |
| | CTGATCATCAGCAAATTCAACCACCAGAACATTGTTCGCTGCATTGGGGTGAGCCTGC | |
| | AATCCCTGCCCCGGTTCATCCTGCTGGAGCTCATGGCGGGGGGAGACCTCAAGTCCTT | |
| | CCTCCGAGAGACCCGCCCTCGCCCGAGCCAGCCCTCCTCCCTGGCCATGCTGGACCTT | |
| | CTGCACGTGGCTCGGGACATTGCCTGTGGCTGTCAGTATTTGGAGGAAAACCACTTCA | |
| | TCCACCGAGACATTGCTGCCAGAAACTGCCTCTTGACCTGTCCAGGCCCTGGAAGAGT | |
| | GGCCAAGATTGGAGACTTCGGGATGGCCCGAGACATCTACAGGGCGAGCTACTATAGA | |
| | AAGGGAGGCTGTGCCATGCTGCCAGTTAAGTGGATGCCCCCAGAGGCCTTCATGGAAG | |
| | GAATATTCACTTCTAAAACAGACACATGGTCCTTTGGAGTGCTGCTATGGGAAATCTT | |
| | TTCTCTTGGATATATGCCATACCCCAGCAAAAGCAACCAGGAAGTTCTGGAGTTTGTC | |
| | ACCAGTGGAGGCCGGATGGACCCACCCAAGAACTGCCCTGGGCCTGTATACCGGATAA | |
| | TGACTCAGTGCTGGCAACATCAGCCTGAAGACAGGCCCAACTTTGCCATCATTTTGGA | |
| | GAGGATTGAATACTGCACCCAGGACCCGGATGTAATCAACACCGCTTTGCCGATAGAA | |
| | TATGGTCCACTTGTGGAAGAGGAAGAGAAAGTGCCTGTGAGGCCCAAGGACCCTGAGG | |
| | GGGTTCCTCCTCTCCTGGTCTCTCAACAGGCAAAACGGGAGGAGGAGCGCAGCCCAGC | |
| | TGCCCCACCACCTCTGCCTACCACCTCCTCTGGCAAGGCTGCAAAGAAACCCACAGCT | |
| | GCAGAGATCTCTGTTCGAGTCCCTAGAGGGCCGGCCGTGGAAGGGGGACACGTGAATA | |
| | TGGCATTCTCTCAGTCCAACCCTCCTTCGGAGTTGCACAAGGTCCACGGATCCAGAAA | |
| | CAAGCCCACCAGCTTGTGGAACCCAACGTACGGCTCCTGGTTTACAGAGAAACCCACC | |
| | AAAAAGAATAATCCTATAGCAAAGAAGGAGCCACACGACAGGGGTAACCTGGGGCTGG | |
| | AGGGAAGCTGTACTGTCCCACCTAACGTTGCAACTGGGAGACTTCCGGGGGCCTCACT | |
| | GCTCCTAGAGCCCTCTTCGCTGACTGCCAATATGAAGGAGGTACCTCTGTTCAGGCTA | |
| | CGTCACTTCCCTTGTGGGAATGTCAATTACGGCTACCAGCAACAGGGCTTGCCCTTAG | |
| | AAGCCGCTACTGCCCCTGGAGCTGGTCATTACGAGGATACCATTCTGAAAAGCAAGAA | |
| | TAGCATGAACCAGCCTGGGCCCTGA | |
| ALK- | ATGGTGGACTACCACGCGGCGAACCAGTCGTACCAGTACGGCCCCAGCAGCGCGGGCA | 31 |
| ACTN4 | ATGGCGCTGGCGGCGGGGGCAGCATGGGCGACTACATGGCCCAGGAGGACGACTGGGA | |
| | CCGGGACCTGCTGCTGGACCCGGCCTGGGAGAAGCAGCAGCGCAAGACCTTCACGGCA | |
| | TGGTGCAACTCCCACCTGCGGAAGGCAGGCACACAGATCGAGAACATTGATGAGGACT | |
| | TCCGAGACGGGCTCAAGCTCATGCTGCTCCTGGAGGTCATATCAGGGGAGCGGTTACC | |
| | TAAGCCGGAGCGGGGGAAGATGAGAGTGCACAAAATCAACAATGTGAACAAAGCGCTG | |
| | GACTTTATTGCCAGCAAAGGCGTCAAGCTGGTCTCCATCGGGGCAGAAGAGATTGTGG | |
| | ACGGCAACGCAAAGATGACCCTGGGAATGATCTGGACCATCATCCTTAGGTTCGCCAT | |
| | CCAGGACATCTCCGTGGAAGAGACCTCGGCCAAGGAAGGGCTCCTTCTCTGGTGCCAG | |
| | AGAAAGACAGCCCCGTATAAGAACGTCAATGTGCAGAACTTCCACATCAGCTGGAAGG | |
| | ATGGTCTTGCCTTCAATGCCCTGATCCACCGGCACAGACCAGAGCTGATTGAGTATGA | |
| | CAAGCTGAGGAAGGACGACCCTGTCACCAACCTGAACAATGCCTTCGAAGTGGCTGAG | |
| | AAATACCTCGACATCCCCAAGATGCTGGATGCAGAGGTGTACCGCCGGAAGCACCAGG | |
| | AGCTGCAAGCCATGCAGATGGAGCTGCAGAGCCCTGAGTACAAGCTGAGCAAGCTCCG | |
| | CACCTCGACCATCATGACCGACTACAACCCCAACTACTGCTTTGCTGGCAAGACCTCC | |
| | TCCATCAGTGACCTGAAGGAGGTGCCGCGGAAAAACATCACCCTCATTCGGGGTCTGG | |
| | GCCATGGCGCCTTTGGGGAGGTGTATGAAGGCCAGGTGTCCGGAATGCCCAACGACCC | |
| | AAGCCCCCTGCAAGTGGCTGTGAAGACGCTGCCTGAAGTGTGCTCTGAACAGGACGAA | |
| | CTGGATTTCCTCATGGAAGCCCTGATCATCAGCAAATTCAACCACCAGAACATTGTTC | |
| | GCTGCATTGGGGTGAGCCTGCAATCCCTGCCCCGGTTCATCCTGCTGGAGCTCATGGC | |
| | GGGGGGAGACCTCAAGTCCTTCCTCCGAGAGACCCGCCCTCGCCCGAGCCAGCCCTCC | |
| | TCCCTGGCCATGCTGGACCTTCTGCACGTGGCTCGGGACATTGCCTGTGGCTGTCAGT | |
| | ATTTGGAGGAAAACCACTTCATCCACCGAGACATTGCTGCCAGAAACTGCCTCTTGAC | |
| | CTGTCCAGGCCCTGGAAGAGTGGCCAAGATTGGAGACTTCGGGATGGCCCGAGACATC | |
| | TACAGGGCGAGCTACTATAGAAAGGGAGGCTGTGCCATGCTGCCAGTTAAGTGGATGC | |
| | CCCCAGAGGCCTTCATGGAAGGAATATTCACTTCTAAAACAGACACATGGTCCTTTGG | |
| | AGTGCTGCTATGGGAAATCTTTTCTCTTGGATATATGCCATACCCCAGCAAAAGCAAC | |
| | CAGGAAGTTCTGGAGTTTGTCACCAGTGGAGGCCGGATGGACCCACCCAAGAACTGCC | |
| | CTGGGCCTGTATACCGGATAATGACTCAGTGCTGGCAACATCAGCCTGAAGACAGGCC | |
| | CAACTTTGCCATCATTTTGGAGAGGATTGAATACTGCACCCAGGACCCGGATGTAATC | |
| | AACACCGCTTTGCCGATAGAATATGGTCCACTTGTGGAAGAGGAAGAGAAAGTGCCTG | |
| | TGAGGCCCAAGGACCCTGAGGGGGTTCCTCCTCTCCTGGTCTCTCAACAGGCAAAACG | |
| | GGAGGAGGAGCGCAGCCCAGCTGCCCCACCACCTCTGCCTACCACCTCCTCTGGCAAG | |
| | GCTGCAAAGAAACCCACAGCTGCAGAGATCTCTGTTCGAGTCCCTAGAGGGCCGGCCG | |
| | TGGAAGGGGGACACGTGAATATGGCATTCTCTCAGTCCAACCCTCCTTCGGAGTTGCA | |
| | CAAGGTCCACGGATCCAGAAACAAGCCCACCAGCTTGTGGAACCCAACGTACGGCTCC | |
| | TGGTTTACAGAGAAACCCACCAAAAAGAATAATCCTATAGCAAAGAAGGAGCCACACG | |
| | ACAGGGGTAACCTGGGGCTGGAGGGAAGCTGTACTGTCCCACCTAACGTTGCAACTGG | |
| | GAGACTTCCGGGGGCCTCACTGCTCCTAGAGCCCTCTTCGCTGACTGCCAATATGAAG | |
| | GAGGTACCTCTGTTCAGGCTACGTCACTTCCCTTGTGGGAATGTCAATTACGGCTACC | |
| | AGCAACAGGGCTTGCCCTTAGAAGCCGCTACTGCCCCTGGAGCTGGTCATTACGAGGA | |
| | TACCATTCTGAAAAGCAAGAATAGCATGAACCAGCCTGGGCCCTGA | |
| ALK- | ATGGGACGGCCGGAGTCTGCGGGCGGAGGGAGTCGCGGGCCTTTTGAGGGAGGAGGCA | 32 |
| CPSF7 | GAGCGCGCCGGGCCGGTGGCATCTTCCTTACTTTGTCCATCCTCCGGACTCGCGATCT | |
| | TCCTTCCGGAGCCATGTCAGAAGGAGTGGACTTGATTGATATATATGCTGACGAGGAG | |
| | TTCAACCAGGACCCAGAGTTCAACAATACAGATCAGATTGACCTGTATGATGATGTGC | |
| | TGACAGCCACCTCACAGCCCTCAGATGACAGAAGCAGCAGCACTGAACCACCTCCTCC | |
| | TGTTCGCCAGGAGCCATCTCCCAAGCCCAACAACAAGACCCCTGCAATTCTGTATACC | |
| | TACAGTGGCCTGCGTAATAGACGAGCTGCCGTTTATGTGGGCAGCTTCTCCTGGTGGA | |
| | CCACAGACCAGCAGCTGATCCAGGTTATTCGCTCTATAGGAGTCTATGATGTGGTGGA | |
| | GTTGAAATTTGCAGAGAATCGAGCAAATGGCCAGTCCAAAGGGTATGCTGAGGTGGTG | |
| | GTAGCCTCTGAAAACTCTGTCCACAAATTGTTGGAACTCCTACCAGGGAAAGTTCTTA | |
| | ATGGAGAAAAAGTGGACGTGAGGCCGGCCACCCGGCAGAACCTGTCACAGTTTGAGGC | |
| | ACAGGCTCGGAAACGTGAGTGTGTCCGAGTCCCAAGAGGGGTGTACCGCCGGAAGCAC | |
| | CAGGAGCTGCAAGCCATGCAGATGGAGCTGCAGAGCCCTGAGTACAAGCTGAGCAAGC | |
| | TCCGCACCTCGACCATCATGACCGACTACAACCCCAACTACTGCTTTGCTGGCAAGAC | |
| | CTCCTCCATCAGTGACCTGAAGGAGGTGCCGCGGAAAAACATCACCCTCATTCGGGGT | |
| | CTGGGCCATGGCGCCTTTGGGGAGGTGTATGAAGGCCAGGTGTCCGGAATGCCCAACG | |
| | ACCCAAGCCCCCTGCAAGTGGCTGTGAAGACGCTGCCTGAAGTGTGCTCTGAACAGGA | |
| | CGAACTGGATTTCCTCATGGAAGCCCTGATCATCAGCAAATTCAACCACCAGAACATT | |
| | GTTCGCTGCATTGGGGTGAGCCTGCAATCCCTGCCCCGGTTCATCCTGCTGGAGCTCA | |
| | TGGCGGGGGGAGACCTCAAGTCCTTCCTCCGAGAGACCCGCCCTCGCCCGAGCCAGCC | |
| | CTCCTCCCTGGCCATGCTGGACCTTCTGCACGTGGCTCGGGACATTGCCTGTGGCTGT | |
| | CAGTATTTGGAGGAAAACCACTTCATCCACCGAGACATTGCTGCCAGAAACTGCCTCT | |
| | TGACCTGTCCAGGCCCTGGAAGAGTGGCCAAGATTGGAGACTTCGGGATGGCCCGAGA | |
| | CATCTACAGGGCGAGCTACTATAGAAAGGGAGGCTGTGCCATGCTGCCAGTTAAGTGG | |
| | ATGCCCCCAGAGGCCTTCATGGAAGGAATATTCACTTCTAAAACAGACACATGGTCCT | |
| | TTGGAGTGCTGCTATGGGAAATCTTTTCTCTTGGATATATGCCATACCCCAGCAAAAG | |
| | CAACCAGGAAGTTCTGGAGTTTGTCACCAGTGGAGGCCGGATGGACCCACCCAAGAAC | |
| | TGCCCTGGGCCTGTATACCGGATAATGACTCAGTGCTGGCAACATCAGCCTGAAGACA | |
| | GGCCCAACTTTGCCATCATTTTGGAGAGGATTGAATACTGCACCCAGGACCCGGATGT | |
| | AATCAACACCGCTTTGCCGATAGAATATGGTCCACTTGTGGAAGAGGAAGAGAAAGTG | |
| | CCTGTGAGGCCCAAGGACCCTGAGGGGGTTCCTCCTCTCCTGGTCTCTCAACAGGCAA | |
| | AACGGGAGGAGGAGCGCAGCCCAGCTGCCCCACCACCTCTGCCTACCACCTCCTCTGG | |
| | CAAGGCTGCAAAGAAACCCACAGCTGCAGAGATCTCTGTTCGAGTCCCTAGAGGGCCG | |
| | GCCGTGGAAGGGGGACACGTGAATATGGCATTCTCTCAGTCCAACCCTCCTTCGGAGT | |
| | TGCACAAGGTCCACGGATCCAGAAACAAGCCCACCAGCTTGTGGAACCCAACGTACGG | |
| | CTCCTGGTTTACAGAGAAACCCACCAAAAAGAATAATCCTATAGCAAAGAAGGAGCCA | |
| | CACGACAGGGGTAACCTGGGGCTGGAGGGAAGCTGTACTGTCCCACCTAACGTTGCAA | |
| | CTGGGAGACTTCCGGGGGCCTCACTGCTCCTAGAGCCCTCTTCGCTGACTGCCAATAT | |
| | GAAGGAGGTACCTCTGTTCAGGCTACGTCACTTCCCTTGTGGGAATGTCAATTACGGC | |
| | TACCAGCAACAGGGCTTGCCCTTAGAAGCCGCTACTGCCCCTGGAGCTGGTCATTACG | |
| | AGGATACCATTCTGAAAAGCAAGAATAGCATGAACCAGCCTGGGCCCTGA | |
| ALK- | ATGGCGGCCGCCAAGGTGGCTTTAACCAAGAGAGCAGATCCAGCTGAGCTTAGAACAA | 33 |
| SLC25A13 | TATTTTTGAAGTATGCAAGCATTGAGAAAAACGGTGAATTTTTCATGTCCCCCAATGA | |
| | CTTTGTCACTCGATACTTGAACATTTTTGGAGAAAGCCAGCCTAATCCAAAGACTGTG | |
| | GAACTTTTAAGTGGAGTGGTGGATCAGACCAAAGATGGATTAATATCTTTTCAAGAAT | |
| | TTGTTGCCTTTGAATCTGTCCTGTGTGCCCCTGATGCTTTGTTTATGGTAGCCTTTCA | |
| | GCTGTTTGACAAAGCTGGCAAAGGAGAAGTAACTTTTGAGGATGTTAAGCAAGTTTTT | |
| | GGACAGACCACAATTCATCAACATATTCCATTTAACTGGGATTCAGAATTTGTGCAAC | |
| | TACATTTTGGAAAAGAAAGAAAAAGACACCTGACATATGCGGAATTTACTCAGTTTTT | |
| | ATTGGAAATACAACTGGAGCACGCAAAGCAAGCCTTTGTGCAACGGGACAATGCTAGG | |
| | ACTGGGAGAGTCACAGCCATCGACTTCCGAGACATCATGGTCACCATCCGCCCCCATG | |
| | TCTTGACTCCTTTTGTAGAAGAATGTCTAGTAGCTGCTGCTGGAGGTACCACATCCCA | |
| | TCAAGTTAGTTTCTCCTATTTTAATGGATTTAATTCGCTCCTTAACAACATGGAACTC | |
| | ATTAGAAAGATCTATAGCACTCTGGCTGGCACCAGGAAAGATGTTGAAGTGACTAAGG | |
| | AGGAGTTTGTTCTGGCAGCTCAGAAATTTGGTCAGGTTACACCCATGGAAGTTGACAT | |
| | CTTGTTTCAGTTAGCAGATTTATATGAGCCAAGGGGACGTATGACCTTAGCAGACATT | |
| | GAACGGATTGCTCCTCTGGAAGAGGGAACTCTGCCCTTTAACTTGGCTGAGGCCCAGA | |
| | GGCAGAAGGCCTCAGGTGATTCAGCTCGACCAGTTCTTCTACAAGTTGCAGAGTCGGC | |
| | CTACAGGTTTGGTCTGGGTTCTGTTGCTGGAGTGTACCGCCGGAAGCACCAGGAGCTG | |
| | CAAGCCATGCAGATGGAGCTGCAGAGCCCTGAGTACAAGCTGAGCAAGCTCCGCACCT | |
| | CGACCATCATGACCGACTACAACCCCAACTACTGCTTTGCTGGCAAGACCTCCTCCAT | |
| | CAGTGACCTGAAGGAGGTGCCGCGGAAAAACATCACCCTCATTCGGGGTCTGGGCCAT | |
| | GGCGCCTTTGGGGAGGTGTATGAAGGCCAGGTGTCCGGAATGCCCAACGACCCAAGCC | |
| | CCCTGCAAGTGGCTGTGAAGACGCTGCCTGAAGTGTGCTCTGAACAGGACGAACTGGA | |
| | TTTCCTCATGGAAGCCCTGATCATCAGCAAATTCAACCACCAGAACATTGTTCGCTGC | |
| | ATTGGGGTGAGCCTGCAATCCCTGCCCCGGTTCATCCTGCTGGAGCTCATGGCGGGGG | |
| | GAGACCTCAAGTCCTTCCTCCGAGAGACCCGCCCTCGCCCGAGCCAGCCCTCCTCCCT | |
| | GGCCATGCTGGACCTTCTGCACGTGGCTCGGGACATTGCCTGTGGCTGTCAGTATTTG | |
| | GAGGAAAACCACTTCATCCACCGAGACATTGCTGCCAGAAACTGCCTCTTGACCTGTC | |
| | CAGGCCCTGGAAGAGTGGCCAAGATTGGAGACTTCGGGATGGCCCGAGACATCTACAG | |
| | GGCGAGCTACTATAGAAAGGGAGGCTGTGCCATGCTGCCAGTTAAGTGGATGCCCCCA | |
| | GAGGCCTTCATGGAAGGAATATTCACTTCTAAAACAGACACATGGTCCTTTGGAGTGC | |
| | TGCTATGGGAAATCTTTTCTCTTGGATATATGCCATACCCCAGCAAAAGCAACCAGGA | |
| | AGTTCTGGAGTTTGTCACCAGTGGAGGCCGGATGGACCCACCCAAGAACTGCCCTGGG | |
| | CCTGTATACCGGATAATGACTCAGTGCTGGCAACATCAGCCTGAAGACAGGCCCAACT | |
| | TTGCCATCATTTTGGAGAGGATTGAATACTGCACCCAGGACCCGGATGTAATCAACAC | |
| | CGCTTTGCCGATAGAATATGGTCCACTTGTGGAAGAGGAAGAGAAAGTGCCTGTGAGG | |
| | CCCAAGGACCCTGAGGGGGTTCCTCCTCTCCTGGTCTCTCAACAGGCAAAACGGGAGG | |
| | AGGAGCGCAGCCCAGCTGCCCCACCACCTCTGCCTACCACCTCCTCTGGCAAGGCTGC | |
| | AAAGAAACCCACAGCTGCAGAGATCTCTGTTCGAGTCCCTAGAGGGCCGGCCGTGGAA | |
| | GGGGGACACGTGAATATGGCATTCTCTCAGTCCAACCCTCCTTCGGAGTTGCACAAGG | |
| | TCCACGGATCCAGAAACAAGCCCACCAGCTTGTGGAACCCAACGTACGGCTCCTGGTT | |
| | TACAGAGAAACCCACCAAAAAGAATAATCCTATAGCAAAGAAGGAGCCACACGACAGG | |
| | GGTAACCTGGGGCTGGAGGGAAGCTGTACTGTCCCACCTAACGTTGCAACTGGGAGAC | |
| | TTCCGGGGGCCTCACTGCTCCTAGAGCCCTCTTCGCTGACTGCCAATATGAAGGAGGT | |
| | ACCTCTGTTCAGGCTACGTCACTTCCCTTGTGGGAATGTCAATTACGGCTACCAGCAA | |
| | CAGGGCTTGCCCTTAGAAGCCGCTACTGCCCCTGGAGCTGGTCATTACGAGGATACCA | |
| | TTCTGAAAAGCAAGAATAGCATGAACCAGCCTGGGCCCTGA | |
| ALK- | ATGGACGACTCAGAGGTGGAGTCGACCGCCAGCATCTTGGCCTCTGTGAAGGAACAAG | 34 |
| CTNND1 | AGGCCCAGTTTGAGAAGCTGACCCGGGCGCTGGAGGAGGAACGGCGCCACGTCTCGGC | |
| | GCAGCTGGAACGCGTCCGGGTCTCACCACAAGATGCCAACCCACTCATGGCCAACGGC | |
| | ACACTCACCCGCCGGCATCAGAACGGCCGGTTTGTGGGCGATGCTGACCTTGAAAGAC | |
| | AGAAATTTTCAGATTTGAAACTCAACGGACCCCAGGATCACAGTCACCTTCTATATAG | |
| | CACCATCCCCAGGATGCAGGAGCCGGGGCAGATTGTGGAGACCTACACGGAGGAGGAT | |
| | CCTGAGGGAGCCATGTCTGTAGTCTCTGTGGAGACCTCAGATGATGGGACCACTCGGC | |
| | GCACAGAGACCACGGTCAAGAAAGTAGTGAAGACTGTGACAACACGGACAGTACAGCC | |
| | AGTCGCTATGGGACCAGACGGGTTGCCTGTGGATGCTTCATCAGTTTCTAACAACTAT | |
| | ATCCAGACTTTGGGTCGTGATTTCCGCAAGAATGGCAATGGGGGACCTGGTCCCTATG | |
| | TGGGGCAAGCTGGCACTGCTACCCTTCCTAGGAACTTCCACTACCCTCCTGATGGTTA | |
| | TAGTCGCCACTATGAAGATGGTTATCCAGGTGGCAGTGATAACTATGGCAGTCTGTCC | |
| | CGGGTGACCCGCATTGAGGAGCGGTATAGGCCCAGCATGGAAGGCTACCGGGCACCTA | |
| | GTAGACAGGATGTGTATGGGCCCCAACCCCAGGTTCGGGTAGGTGGGAGCAGCGTGGA | |
| | TCTGCATCGCTTTCATCCAGAGCCTTATGGGCTAGAGGATGACCAGCGTAGTATGGGC | |
| | TATGATGACCTGGATTATGGTATGATGTCTGATTATGGCACTGCCCGTCGGACTGGGA | |
| | CACCCTCTGACCCTCGTCGGCGCCTCAGGAGCTATGAAGACATGATTGGTGAGGAGGT | |
| | GCCATCGGATCAATACTACTGGGCTCCTTTGGCCCAGCATGAGCGAGGAAGTTTAGCA | |
| | AGCTTGGATAGCCTGCGCAAAGGAGGGCCTCCACCTCCTAATTGGAGACAGCCAGAGC | |
| | TGCCAGAGGTGATCGCCATGCTTGGATTCCGCTTGGATGCTGTCAAGTCCAATGCAGC | |
| | TGCATACCTGCAACACTTATGCTACCGCAATGACAAGGTGAAGACTGACGTGCGGAAG | |
| | CTCAAGGGCATCCCAGTACTGGTGGGATTGTTAGACCATCCCAAAAAGGAAGTGCACC | |
| | TTGGAGCCTGTGGAGCTCTCAAGAATATCTCTTTTGGACGTGACCAGGATAACAAGAT | |
| | TGCCATAAAAAACTGTGATGGTGTGCCTGCCCTTGTGCGATTGCTTCGAAAGGCTCGT | |
| | GATATGGACCTTACTGAAGTTATTACCGGAACCCTGTGGAATCTTTCATCCCATGACT | |
| | CAATCAAAATGGAGATTGTGGACCATGCACTGCATGCCTTGACAGATGAAGTGATCAT | |
| | TCCTCATTCTGGTTGGGAGCGGGAACCTAATGAAGACTGTAAGCCACGCCACATTGAG | |
| | TGGGAATCGGTGCTCACCAACACAGCTGGCTGCCTTAGGAATGTAAGCTCAGAGAGGA | |
| | GTGAAGCTCGCCGGAAACTTCGGGAATGTGATGGTTTAGTTGATGCCCTCATTTTCAT | |
| | TGTTCAGGCTGAGATTGGGCAGAAGGATTCAGACAGCAAGCTTGTAGAGAACTGTGTT | |
| | TGCCTTCTTCGGAACTTATCATATCAAGTTCACCGGGAGATCCCACAGGCAGAGCGTT | |
| | ACCAAGAGGCAGCTCCCAATGTTGCCAACAATACTGGGCCACATGCTGCCAGTTGCTT | |
| | TGGGGCCAAGAAGGGCAAAGGGAAAAAACCTATAGAGGATCCAGCAAACGATACAGTG | |
| | GATTTCCCTAAAAGAACGAGTCCAGCTCGAGGCTATGAGCTCTTATTTCAGCCAGAGG | |
| | TGGTTCGGATATACATCTCACTTCTTAAGGAGAGCAAGACTCCTGCCATCCTAGAAGC | |
| | CTCAGCTGGAGCTATCCAGAACTTGTGTGCTGGGCGCTGGACGTATGGTCGATACATC | |
| | CGCTCTGCTCTGCGTCAAGAGAAGGCTCTTTCTGCCATAGCTGACCTCCTGACTAATG | |
| | AACATGAACGGGTGGTGAAAGCTGCATCTGGAGCACTGAGAAACCTGGCTGTGGATGC | |
| | TCGCAACAAAGAATTAATTGGTAAACATGCTATTCCTAACTTGGTAAAGAATCTGCCA | |
| | GGAGGACAGCAGAACTCCTCTTGGAATTTCTCTGAGGACACTGTCATCTCTATTTTGA | |
| | ACACTATCAACGAGGTTATCGCTGAGAACTTGGAGGCTGCCAAAAAGCTTCGAGAGAC | |
| | ACAGGGTATTGAGAAGCTGGTGTTGATCAACAAATCAGGGAACCGCTCAGAAAAAGAA | |
| | GTTCGAGCAGCAGCACTTGTATTACAGACAATCTGGGGATATAAGGAACTGCGGAAGC | |
| | CACTGGAAAAAGAAGGATGGAAGAAATCAGACTTTCAGGTGAATCTAAACAATGCTTC | |
| | CCGAAGCCAGAGCAGTCATTCATATGATGATAGTACTCTCCCTCTCATTGACCGGAAC | |
| | CAAAAATCAGTGTACCGCCGGAAGCACCAGGAGCTGCAAGCCATGCAGATGGAGCTGC | |
| | AGAGCCCTGAGTACAAGCTGAGCAAGCTCCGCACCTCGACCATCATGACCGACTACAA | |
| | CCCCAACTACTGCTTTGCTGGCAAGACCTCCTCCATCAGTGACCTGAAGGAGGTGCCG | |
| | CGGAAAAACATCACCCTCATTCGGGGTCTGGGCCATGGCGCCTTTGGGGAGGTGTATG | |
| | AAGGCCAGGTGTCCGGAATGCCCAACGACCCAAGCCCCCTGCAAGTGGCTGTGAAGAC | |
| | GCTGCCTGAAGTGTGCTCTGAACAGGACGAACTGGATTTCCTCATGGAAGCCCTGATC | |
| | ATCAGCAAATTCAACCACCAGAACATTGTTCGCTGCATTGGGGTGAGCCTGCAATCCC | |
| | TGCCCCGGTTCATCCTGCTGGAGCTCATGGCGGGGGGAGACCTCAAGTCCTTCCTCCG | |
| | AGAGACCCGCCCTCGCCCGAGCCAGCCCTCCTCCCTGGCCATGCTGGACCTTCTGCAC | |
| | GTGGCTCGGGACATTGCCTGTGGCTGTCAGTATTTGGAGGAAAACCACTTCATCCACC | |
| | GAGACATTGCTGCCAGAAACTGCCTCTTGACCTGTCCAGGCCCTGGAAGAGTGGCCAA | |
| | GATTGGAGACTTCGGGATGGCCCGAGACATCTACAGGGCGAGCTACTATAGAAAGGGA | |
| | GGCTGTGCCATGCTGCCAGTTAAGTGGATGCCCCCAGAGGCCTTCATGGAAGGAATAT | |
| | TCACTTCTAAAACAGACACATGGTCCTTTGGAGTGCTGCTATGGGAAATCTTTTCTCT | |
| | TGGATATATGCCATACCCCAGCAAAAGCAACCAGGAAGTTCTGGAGTTTGTCACCAGT | |
| | GGAGGCCGGATGGACCCACCCAAGAACTGCCCTGGGCCTGTATACCGGATAATGACTC | |
| | AGTGCTGGCAACATCAGCCTGAAGACAGGCCCAACTTTGCCATCATTTTGGAGAGGAT | |
| | TGAATACTGCACCCAGGACCCGGATGTAATCAACACCGCTTTGCCGATAGAATATGGT | |
| | CCACTTGTGGAAGAGGAAGAGAAAGTGCCTGTGAGGCCCAAGGACCCTGAGGGGGTTC | |
| | CTCCTCTCCTGGTCTCTCAACAGGCAAAACGGGAGGAGGAGCGCAGCCCAGCTGCCCC | |
| | ACCACCTCTGCCTACCACCTCCTCTGGCAAGGCTGCAAAGAAACCCACAGCTGCAGAG | |
| | ATCTCTGTTCGAGTCCCTAGAGGGCCGGCCGTGGAAGGGGGACACGTGAATATGGCAT | |
| | TCTCTCAGTCCAACCCTCCTTCGGAGTTGCACAAGGTCCACGGATCCAGAAACAAGCC | |
| | CACCAGCTTGTGGAACCCAACGTACGGCTCCTGGTTTACAGAGAAACCCACCAAAAAG | |
| | AATAATCCTATAGCAAAGAAGGAGCCACACGACAGGGGTAACCTGGGGCTGGAGGGAA | |
| | GCTGTACTGTCCCACCTAACGTTGCAACTGGGAGACTTCCGGGGGCCTCACTGCTCCT | |
| | AGAGCCCTCTTCGCTGACTGCCAATATGAAGGAGGTACCTCTGTTCAGGCTACGTCAC | |
| | TTCCCTTGTGGGAATGTCAATTACGGCTACCAGCAACAGGGCTTGCCCTTAGAAGCCG | |
| | CTACTGCCCCTGGAGCTGGTCATTACGAGGATACCATTCTGAAAAGCAAGAATAGCAT | |
| | GAACCAGCCTGGGCCCTGA | |
| ALK-KLC4 | ATGTCAGGCCTGGTGTTGGGGCAGCGGGATGAGCCTGCAGGCCACCGGCTCAGCCAAG | 35 |
| | AGGAGATCCTGGGGAGCACACGGCTGGTCAGCCAAGGGCTAGAGGCCCTACGCAGTGA | |
| | ACACCAGGCCGTGCTGCAAAGCCTGTCCCAGACCATTGAGTGTCTGCAGCAGGGAGGC | |
| | CATGAGGAAGGGCTGGTGCATGAGAAGGCCCGGCAGCTTCGCCGTTCTATGGAAAACA | |
| | TTGAGCTCGGGCTGAGTGAGGCCCAGGTGATGCTGGCTCTAGCCAGCCACCTGAGCAC | |
| | AGTGGAGTCGGAGAAACAGAAGCTGCGGGCTCAGGTGCGGCGGCTATGCCAGGAGAAC | |
| | CAGTGGCTGCGGGATGAGCTGGCTGGCACCCAGCAGCGGCTACAGCGCAGTGAACAGG | |
| | CTGTGGCTCAGCTGGAGGAGGAAAAGAAGCACCTGGAGTTCCTGGGGCAGCTGCGGCA | |
| | GTATGATGAGGATGGACATACCTCGGAGGAGAAAGAAGGCGATGCCACCAAGGATTCC | |
| | CTGGATGACCTCTTTCCTAATGAGGAGGAAGAGGACCCCAGCAATGGCTTGTCCCGTG | |
| | GTCAAGGTGCTACAGCAGCTCAGCAGGGTGGATATGAGATCCCAGCAAGGTTGCGGAC | |
| | GTTGCACAACCTGGTGATCCAGTACGCAGCCCAAGGTCGCTATGAGGTGGCCGTGCCA | |
| | CTCTGTAAGCAGGCACTAGAGGACCTGGAGCGCACATCAGGCCGTGGCCACCCTGATG | |
| | TCGCCACCATGCTCAACATCCTTGCTTTGGTGTATCGTGACCAGAATAAGTATAAGGA | |
| | AGCTGCCCACCTGCTGAATGATGCCCTTAGCATCCGGGAGAGCACCTTGGGACCTGAC | |
| | CATCCTGCTGTGGCTGCCACACTCAACAATTTGGCTGTGCTCTATGGCAAAAGGGGCA | |
| | AGTACAAGGAGGCAGAGCCTCTGTGCCAGCGGGCACTGGAGATTCGAGAAAAGGTCCT | |
| | GGGCACGAATCATCCAGATGTGGCAAAACAGCTGAACAACCTGGCCCTCTTGTGCCAA | |
| | AACCAGGGCAAGTATGAGGCCGTGGAACGCTACTACCAGCGAGCACTGGCCATCTACG | |
| | AGGGGCAGCTGGGGCCGGACAACCCTAATGTAGCCCGGACCAAGAACAACCTGGCTTC | |
| | CTGTTACCTGAAACAGGGCAAATATGCTGAGGCTGAGACACTATACAAAGAGATCCTG | |
| | ACCCGTGCCCATGTACAGGAGTTTGGGTCTGTGGATGTGTACCGCCGGAAGCACCAGG | |
| | AGCTGCAAGCCATGCAGATGGAGCTGCAGAGCCCTGAGTACAAGCTGAGCAAGCTCCG | |
| | CACCTCGACCATCATGACCGACTACAACCCCAACTACTGCTTTGCTGGCAAGACCTCC | |
| | TCCATCAGTGACCTGAAGGAGGTGCCGCGGAAAAACATCACCCTCATTCGGGGTCTGG | |
| | GCCATGGCGCCTTTGGGGAGGTGTATGAAGGCCAGGTGTCCGGAATGCCCAACGACCC | |
| | AAGCCCCCTGCAAGTGGCTGTGAAGACGCTGCCTGAAGTGTGCTCTGAACAGGACGAA | |
| | CTGGATTTCCTCATGGAAGCCCTGATCATCAGCAAATTCAACCACCAGAACATTGTTC | |
| | GCTGCATTGGGGTGAGCCTGCAATCCCTGCCCCGGTTCATCCTGCTGGAGCTCATGGC | |
| | GGGGGGAGACCTCAAGTCCTTCCTCCGAGAGACCCGCCCTCGCCCGAGCCAGCCCTCC | |
| | TCCCTGGCCATGCTGGACCTTCTGCACGTGGCTCGGGACATTGCCTGTGGCTGTCAGT | |
| | ATTTGGAGGAAAACCACTTCATCCACCGAGACATTGCTGCCAGAAACTGCCTCTTGAC | |
| | CTGTCCAGGCCCTGGAAGAGTGGCCAAGATTGGAGACTTCGGGATGGCCCGAGACATC | |
| | TACAGGGCGAGCTACTATAGAAAGGGAGGCTGTGCCATGCTGCCAGTTAAGTGGATGC | |
| | CCCCAGAGGCCTTCATGGAAGGAATATTCACTTCTAAAACAGACACATGGTCCTTTGG | |
| | AGTGCTGCTATGGGAAATCTTTTCTCTTGGATATATGCCATACCCCAGCAAAAGCAAC | |
| | CAGGAAGTTCTGGAGTTTGTCACCAGTGGAGGCCGGATGGACCCACCCAAGAACTGCC | |
| | CTGGGCCTGTATACCGGATAATGACTCAGTGCTGGCAACATCAGCCTGAAGACAGGCC | |
| | CAACTTTGCCATCATTTTGGAGAGGATTGAATACTGCACCCAGGACCCGGATGTAATC | |
| | AACACCGCTTTGCCGATAGAATATGGTCCACTTGTGGAAGAGGAAGAGAAAGTGCCTG | |
| | TGAGGCCCAAGGACCCTGAGGGGGTTCCTCCTCTCCTGGTCTCTCAACAGGCAAAACG | |
| | GGAGGAGGAGCGCAGCCCAGCTGCCCCACCACCTCTGCCTACCACCTCCTCTGGCAAG | |
| | GCTGCAAAGAAACCCACAGCTGCAGAGATCTCTGTTCGAGTCCCTAGAGGGCCGGCCG | |
| | TGGAAGGGGGACACGTGAATATGGCATTCTCTCAGTCCAACCCTCCTTCGGAGTTGCA | |
| | CAAGGTCCACGGATCCAGAAACAAGCCCACCAGCTTGTGGAACCCAACGTACGGCTCC | |
| | TGGTTTACAGAGAAACCCACCAAAAAGAATAATCCTATAGCAAAGAAGGAGCCACACG | |
| | ACAGGGGTAACCTGGGGCTGGAGGGAAGCTGTACTGTCCCACCTAACGTTGCAACTGG | |
| | GAGACTTCCGGGGGCCTCACTGCTCCTAGAGCCCTCTTCGCTGACTGCCAATATGAAG | |
| | GAGGTACCTCTGTTCAGGCTACGTCACTTCCCTTGTGGGAATGTCAATTACGGCTACC | |
| | AGCAACAGGGCTTGCCCTTAGAAGCCGCTACTGCCCCTGGAGCTGGTCATTACGAGGA | |
| | TACCATTCTGAAAAGCAAGAATAGCATGAACCAGCCTGGGCCCTGA | |
| ALK- | ATGAGTAACAGCCACCCTCTTCGCCCCTTTACTGCAGTGGGGGAAATTGATCATGTGC | 36 |
| BTBD9 | ACATTTTGTCTGAACATATTGGTGCCTTGTTGATTGGGGAAGAATATGGCGACGTCAC | |
| | ATTCGTGGTGGAAAAGAAACGTTTTCCTGCCCACAGGGTAATTTTAGCAGCCAGGTGC | |
| | CAATATTTTCGAGCATTATTATATGGTGGAATGCGAGAGTCTCAGCCTGAAGCAGAAA | |
| | TTCCTCTCCAAGACACCACTGCAGAAGCATTCACAATGCTACTCAAATATATCTACAC | |
| | TGGGCGGGCAACGCTGACAGATGAGAAGGAGGAGGTGCTGCTGGACTTTTTGAGCCTG | |
| | GCTCATAAATATGGATTTCCAGAGCTAGAGGATTCTACCTCTGAGTATCTCTGCACCA | |
| | TACTTAACATTCAGAATGTCTGCATGACTTTTGATGTTGCCAGTCTCTACTCACTTCC | |
| | CAAGTTAACTTGTATGTGCTGCATGTTTATGGATAGGAATGCTCAGGAAGTCCTCTCA | |
| | AGTGAAGGTTTCCTCTCCCTTTCTAAGACAGCACTTTTAAACATCGTGTTAAGAGACT | |
| | CATTTGCAGCTCCCGAAAAAGATATTTTCCTAGCCTTATTAAACTGGTGTAAGCACAA | |
| | TTCAAAGGAGAATCATGCTGAAATCATGCAGGCTGTGCGTTTACCTCTCATGAGCCTC | |
| | ACAGAGCTTCTGAATGTTGTGAGGCCTTCAGGACTGCTGTCTCCTGATGCCATCCTGG | |
| | ATGCCATTAAAGTGCGATCTGAGAGCCGGGATATGGACCTCAATTATAGAGGCATGCT | |
| | CATGTACCGCCGGAAGCACCAGGAGCTGCAAGCCATGCAGATGGAGCTGCAGAGCCCT | |
| | GAGTACAAGCTGAGCAAGCTCCGCACCTCGACCATCATGACCGACTACAACCCCAACT | |
| | ACTGCTTTGCTGGCAAGACCTCCTCCATCAGTGACCTGAAGGAGGTGCCGCGGAAAAA | |
| | CATCACCCTCATTCGGGGTCTGGGCCATGGCGCCTTTGGGGAGGTGTATGAAGGCCAG | |
| | GTGTCCGGAATGCCCAACGACCCAAGCCCCCTGCAAGTGGCTGTGAAGACGCTGCCTG | |
| | AAGTGTGCTCTGAACAGGACGAACTGGATTTCCTCATGGAAGCCCTGATCATCAGCAA | |
| | ATTCAACCACCAGAACATTGTTCGCTGCATTGGGGTGAGCCTGCAATCCCTGCCCCGG | |
| | TTCATCCTGCTGGAGCTCATGGCGGGGGGAGACCTCAAGTCCTTCCTCCGAGAGACCC | |
| | GCCCTCGCCCGAGCCAGCCCTCCTCCCTGGCCATGCTGGACCTTCTGCACGTGGCTCG | |
| | GGACATTGCCTGTGGCTGTCAGTATTTGGAGGAAAACCACTTCATCCACCGAGACATT | |
| | GCTGCCAGAAACTGCCTCTTGACCTGTCCAGGCCCTGGAAGAGTGGCCAAGATTGGAG | |
| | ACTTCGGGATGGCCCGAGACATCTACAGGGCGAGCTACTATAGAAAGGGAGGCTGTGC | |
| | CATGCTGCCAGTTAAGTGGATGCCCCCAGAGGCCTTCATGGAAGGAATATTCACTTCT | |
| | AAAACAGACACATGGTCCTTTGGAGTGCTGCTATGGGAAATCTTTTCTCTTGGATATA | |
| | TGCCATACCCCAGCAAAAGCAACCAGGAAGTTCTGGAGTTTGTCACCAGTGGAGGCCG | |
| | GATGGACCCACCCAAGAACTGCCCTGGGCCTGTATACCGGATAATGACTCAGTGCTGG | |
| | CAACATCAGCCTGAAGACAGGCCCAACTTTGCCATCATTTTGGAGAGGATTGAATACT | |
| | GCACCCAGGACCCGGATGTAATCAACACCGCTTTGCCGATAGAATATGGTCCACTTGT | |
| | GGAAGAGGAAGAGAAAGTGCCTGTGAGGCCCAAGGACCCTGAGGGGGTTCCTCCTCTC | |
| | CTGGTCTCTCAACAGGCAAAACGGGAGGAGGAGCGCAGCCCAGCTGCCCCACCACCTC | |
| | TGCCTACCACCTCCTCTGGCAAGGCTGCAAAGAAACCCACAGCTGCAGAGATCTCTGT | |
| | TCGAGTCCCTAGAGGGCCGGCCGTGGAAGGGGGACACGTGAATATGGCATTCTCTCAG | |
| | TCCAACCCTCCTTCGGAGTTGCACAAGGTCCACGGATCCAGAAACAAGCCCACCAGCT | |
| | TGTGGAACCCAACGTACGGCTCCTGGTTTACAGAGAAACCCACCAAAAAGAATAATCC | |
| | TATAGCAAAGAAGGAGCCACACGACAGGGGTAACCTGGGGCTGGAGGGAAGCTGTACT | |
| | GTCCCACCTAACGTTGCAACTGGGAGACTTCCGGGGGCCTCACTGCTCCTAGAGCCCT | |
| | CTTCGCTGACTGCCAATATGAAGGAGGTACCTCTGTTCAGGCTACGTCACTTCCCTTG | |
| | TGGGAATGTCAATTACGGCTACCAGCAACAGGGCTTGCCCTTAGAAGCCGCTACTGCC | |
| | CCTGGAGCTGGTCATTACGAGGATACCATTCTGAAAAGCAAGAATAGCATGAACCAGC | |
| | CTGGGCCCTGA | |
| ALK-CPQ | ATGAAATTCCTTATCTTCGCATTTTTCGGTGGTGTTCACCTTTTATCCCTGTGCTCTG | 38 |
| | GGAAAGCTATATGCAAGAATGGCATCTCTAAGAGGACTTTTGAAGAAATAAAAGAAGA | |
| | AATAGCCAGCTGTGGAGATGTTGCTAAAGCAATCATCAACCTAGCTGTTTATGGTAAA | |
| | GCCCAGAACAGATCCTATGAGCGATTGGCACTTCTGGTTGATACTGTTGGACCCAGAC | |
| | TGAGTGGCTCCAAGAACCTAGAAAAAGCCATCCAAATTATGTACCAAAACCTGCAGCA | |
| | AGATGGGCTGGAGAAAGTTCACCTGGAGCCAGTGAGAATACCCCACTGGGAGAGGGGA | |
| | GAAGAATCAGCTGTGATGCTGGAGCCAAGAATTCATAAGATAGCCATCCTGGGTCTTG | |
| | GCAGCAGCATTGGGACTCCTCCAGAAGGCATTACAGCAGAAGTTCTGGTGGTGACCTC | |
| | TTTCGATGAACTGCAGAGAAGGGCCTCAGAAGCAAGAGGGAAGATTGTTGTTTATAAC | |
| | CAACCTTACATCAACTACTCAAGGACGGTGCAATACCGAACGCAGGGGGCGGTGGAAG | |
| | CTGCCAAGGTGGGGGCTTTGGCATCTCTCATTCGATCCGTGGCCTCCTTCTCCATCTA | |
| | CAGTCCTCACACAGGTATTCAGGAATACCAGGATGGCGTGCCCAAGATTCCAACAGCC | |
| | TGTATTACGGTGGAAGATGCAGAAATGATGTCAAGAATGGCTTCTCATGGGATCAAAA | |
| | TTGTCATTCAGCTAAAGATGGGGGCAAAGACCTACCCAGATACTGATTCCTTCAACAC | |
| | TGTAGCAGAGATCACTGGGAGCAAATATCCAGAACAGGTTGTACTGGTCAGTGGACAT | |
| | CTGGACAGCTGGGATGTTGGGCAGGGTGCCATGGATGATGGCGGTGGAGCCTTTATAT | |
| | CATGGGAAGCACTCTCACTTATTAAAGATCTTGGGCTGCGTCCAAAGAGGACTCTGCG | |
| | GCTGGTGCTCTGGACTGCAGAAGAACAAGGTGGAGTTGGTGCCTTCCAGTATTATCAG | |
| | TTACACAAGGTAAATATTTCCAACTACAGTCTGGTGATGGAGTCTGACGCAGGAACCT | |
| | TCTTACCCACTGGGCTGCAATTCACTGGCAGTGAAAAGGCCAGGGCCATCATGGAGGA | |
| | GGTTATGAGCCTGCTGCAGCCCCTCAATATCACTCAGGTCCTGAGCCATGGAGAAGGG | |
| | ACAGACATCAACTTTTGGATCCAAGCTGGAGTGCCTGTGTACCGCCGGAAGCACCAGG | |
| | AGCTGCAAGCCATGCAGATGGAGCTGCAGAGCCCTGAGTACAAGCTGAGCAAGCTCCG | |
| | CACCTCGACCATCATGACCGACTACAACCCCAACTACTGCTTTGCTGGCAAGACCTCC | |
| | TCCATCAGTGACCTGAAGGAGGTGCCGCGGAAAAACATCACCCTCATTCGGGGTCTGG | |
| | GCCATGGCGCCTTTGGGGAGGTGTATGAAGGCCAGGTGTCCGGAATGCCCAACGACCC | |
| | AAGCCCCCTGCAAGTGGCTGTGAAGACGCTGCCTGAAGTGTGCTCTGAACAGGACGAA | |
| | CTGGATTTCCTCATGGAAGCCCTGATCATCAGCAAATTCAACCACCAGAACATTGTTC | |
| | GCTGCATTGGGGTGAGCCTGCAATCCCTGCCCCGGTTCATCCTGCTGGAGCTCATGGC | |
| | GGGGGGAGACCTCAAGTCCTTCCTCCGAGAGACCCGCCCTCGCCCGAGCCAGCCCTCC | |
| | TCCCTGGCCATGCTGGACCTTCTGCACGTGGCTCGGGACATTGCCTGTGGCTGTCAGT | |
| | ATTTGGAGGAAAACCACTTCATCCACCGAGACATTGCTGCCAGAAACTGCCTCTTGAC | |
| | CTGTCCAGGCCCTGGAAGAGTGGCCAAGATTGGAGACTTCGGGATGGCCCGAGACATC | |
| | TACAGGGCGAGCTACTATAGAAAGGGAGGCTGTGCCATGCTGCCAGTTAAGTGGATGC | |
| | CCCCAGAGGCCTTCATGGAAGGAATATTCACTTCTAAAACAGACACATGGTCCTTTGG | |
| | AGTGCTGCTATGGGAAATCTTTTCTCTTGGATATATGCCATACCCCAGCAAAAGCAAC | |
| | CAGGAAGTTCTGGAGTTTGTCACCAGTGGAGGCCGGATGGACCCACCCAAGAACTGCC | |
| | CTGGGCCTGTATACCGGATAATGACTCAGTGCTGGCAACATCAGCCTGAAGACAGGCC | |
| | CAACTTTGCCATCATTTTGGAGAGGATTGAATACTGCACCCAGGACCCGGATGTAATC | |
| | AACACCGCTTTGCCGATAGAATATGGTCCACTTGTGGAAGAGGAAGAGAAAGTGCCTG | |
| | TGAGGCCCAAGGACCCTGAGGGGGTTCCTCCTCTCCTGGTCTCTCAACAGGCAAAACG | |
| | GGAGGAGGAGCGCAGCCCAGCTGCCCCACCACCTCTGCCTACCACCTCCTCTGGCAAG | |
| | GCTGCAAAGAAACCCACAGCTGCAGAGATCTCTGTTCGAGTCCCTAGAGGGCCGGCCG | |
| | TGGAAGGGGGACACGTGAATATGGCATTCTCTCAGTCCAACCCTCCTTCGGAGTTGCA | |
| | CAAGGTCCACGGATCCAGAAACAAGCCCACCAGCTTGTGGAACCCAACGTACGGCTCC | |
| | TGGTTTACAGAGAAACCCACCAAAAAGAATAATCCTATAGCAAAGAAGGAGCCACACG | |
| | ACAGGGGTAACCTGGGGCTGGAGGGAAGCTGTACTGTCCCACCTAACGTTGCAACTGG | |
| | GAGACTTCCGGGGGCCTCACTGCTCCTAGAGCCCTCTTCGCTGACTGCCAATATGAAG | |
| | GAGGTACCTCTGTTCAGGCTACGTCACTTCCCTTGTGGGAATGTCAATTACGGCTACC | |
| | AGCAACAGGGCTTGCCCTTAGAAGCCGCTACTGCCCCTGGAGCTGGTCATTACGAGGA | |
| | TACCATTCTGAAAAGCAAGAATAGCATGAACCAGCCTGGGCCCTGA | |
| ALK-KIF5C | ATGGCGGATCCAGCCGAATGCAGCATCAAAGTGATGTGCCGGTTCCGGCCCCTCAACG | 40 |
| | AAGCGGAGATCCTCCGCGGGGACAAATTCATCCCCAAATTTAAAGGCGATGAGACCGT | |
| | GGTGATCGGGCAAGGGAAGCCATATGTCTTCGACAGAGTGCTACCTCCCAACACGACC | |
| | CAAGAGCAGGTTTACAATGCATGTGCGAAGCAAATTGTCAAAGATGTCCTTGAAGGTT | |
| | ATAACGGGACGATTTTTGCGTATGGGCAGACTTCATCAGGAAAAACCCACACCATGGA | |
| | GGGGAAGCTGCATGACCCCCAGCTCATGGGGATCATCCCACGAATTGCCCATGATATC | |
| | TTTGACCATATCTACTCCATGGATGAGAACCTGGAGTTTCACATAAAGGTTTCCTATT | |
| | TTGAGATCTACTTGGACAAAATAAGGGACTTACTTGATGTATCCAAGACCAACTTGGC | |
| | TGTTCATGAAGATAAAAACAGAGTCCCGTATGTAAAGGGGTGCACTGAGCGGTTTGTG | |
| | TCGAGCCCTGAGGAAGTCATGGATGTAATAGATGAAGGCAAAGCAAACCGACACGTGG | |
| | CTGTGACAAACATGAATGAACACAGCTCTAGAAGTCACAGTATCTTCCTGATAAATAT | |
| | TAAACAAGAGAATGTAGAGACTGAAAAAAAACTCAGTGGGAAACTTTATTTGGTTGAT | |
| | TTGGCTGGGAGCGAAAAGGTCAGCAAAACTGGTGCCGAGGGAGCTGTTCTTGACGAAG | |
| | CTAAAAATATCAATAAGTCTTTGTCTGCTCTTGGAAATGTGATCTCTGCTTTGGCAGA | |
| | AGGGACAAAAACACATGTGCCATACCGGGACAGCAAGATGACTCGGATTCTTCAGGAC | |
| | TCTTTGGGTGGGAACTGCAGAACCACCATCGTCATTTGCTGTTCTCCTTCTGTCTTCA | |
| | ATGAGGCTGAGACCAAGTCCACACTGATGTTCGGACAGAGAGCTAAGACCATCAAGAA | |
| | TACAGTCTCTGTGAACCTAGAACTGACAGCAGAAGAATGGAAGAAGAAATATGAAAAA | |
| | GAGAAAGAGAAAAACAAGACTTTGAAGAATGTTATCCAGCATCTGGAGATGGAGCTAA | |
| | ACAGGTGGAGGAATGTGTACCGCCGGAAGCACCAGGAGCTGCAAGCCATGCAGATGGA | |
| | GCTGCAGAGCCCTGAGTACAAGCTGAGCAAGCTCCGCACCTCGACCATCATGACCGAC | |
| | TACAACCCCAACTACTGCTTTGCTGGCAAGACCTCCTCCATCAGTGACCTGAAGGAGG | |
| | TGCCGCGGAAAAACATCACCCTCATTCGGGGTCTGGGCCATGGCGCCTTTGGGGAGGT | |
| | GTATGAAGGCCAGGTGTCCGGAATGCCCAACGACCCAAGCCCCCTGCAAGTGGCTGTG | |
| | AAGACGCTGCCTGAAGTGTGCTCTGAACAGGACGAACTGGATTTCCTCATGGAAGCCC | |
| | TGATCATCAGCAAATTCAACCACCAGAACATTGTTCGCTGCATTGGGGTGAGCCTGCA | |
| | ATCCCTGCCCCGGTTCATCCTGCTGGAGCTCATGGCGGGGGGAGACCTCAAGTCCTTC | |
| | CTCCGAGAGACCCGCCCTCGCCCGAGCCAGCCCTCCTCCCTGGCCATGCTGGACCTTC | |
| | TGCACGTGGCTCGGGACATTGCCTGTGGCTGTCAGTATTTGGAGGAAAACCACTTCAT | |
| | CCACCGAGACATTGCTGCCAGAAACTGCCTCTTGACCTGTCCAGGCCCTGGAAGAGTG | |
| | GCCAAGATTGGAGACTTCGGGATGGCCCGAGACATCTACAGGGCGAGCTACTATAGAA | |
| | AGGGAGGCTGTGCCATGCTGCCAGTTAAGTGGATGCCCCCAGAGGCCTTCATGGAAGG | |
| | AATATTCACTTCTAAAACAGACACATGGTCCTTTGGAGTGCTGCTATGGGAAATCTTT | |
| | TCTCTTGGATATATGCCATACCCCAGCAAAAGCAACCAGGAAGTTCTGGAGTTTGTCA | |
| | CCAGTGGAGGCCGGATGGACCCACCCAAGAACTGCCCTGGGCCTGTATACCGGATAAT | |
| | GACTCAGTGCTGGCAACATCAGCCTGAAGACAGGCCCAACTTTGCCATCATTTTGGAG | |
| | AGGATTGAATACTGCACCCAGGACCCGGATGTAATCAACACCGCTTTGCCGATAGAAT | |
| | ATGGTCCACTTGTGGAAGAGGAAGAGAAAGTGCCTGTGAGGCCCAAGGACCCTGAGGG | |
| | GGTTCCTCCTCTCCTGGTCTCTCAACAGGCAAAACGGGAGGAGGAGCGCAGCCCAGCT | |
| | GCCCCACCACCTCTGCCTACCACCTCCTCTGGCAAGGCTGCAAAGAAACCCACAGCTG | |
| | CAGAGATCTCTGTTCGAGTCCCTAGAGGGCCGGCCGTGGAAGGGGGACACGTGAATAT | |
| | GGCATTCTCTCAGTCCAACCCTCCTTCGGAGTTGCACAAGGTCCACGGATCCAGAAAC | |
| | AAGCCCACCAGCTTGTGGAACCCAACGTACGGCTCCTGGTTTACAGAGAAACCCACCA | |
| | AAAAGAATAATCCTATAGCAAAGAAGGAGCCACACGACAGGGGTAACCTGGGGCTGGA | |
| | GGGAAGCTGTACTGTCCCACCTAACGTTGCAACTGGGAGACTTCCGGGGGCCTCACTG | |
| | CTCCTAGAGCCCTCTTCGCTGACTGCCAATATGAAGGAGGTACCTCTGTTCAGGCTAC | |
| | GTCACTTCCCTTGTGGGAATGTCAATTACGGCTACCAGCAACAGGGCTTGCCCTTAGA | |
| | AGCCGCTACTGCCCCTGGAGCTGGTCATTACGAGGATACCATTCTGAAAAGCAAGAAT | |
| | AGCATGAACCAGCCTGGGCCCTGA | |
| ALK- | ATGGCTGTGGCTAGCGATTTCTACCTGCGCTACTACGTAGGGCACAAGGGCAAGTTTG | 41 |
| MAGOHB | GGCACGAGTTTCTGGAGTTCGAATTTCGGCCGGACGTGTACCGCCGGAAGCACCAGGA | |
| | GCTGCAAGCCATGCAGATGGAGCTGCAGAGCCCTGAGTACAAGCTGAGCAAGCTCCGC | |
| | ACCTCGACCATCATGACCGACTACAACCCCAACTACTGCTTTGCTGGCAAGACCTCCT | |
| | CCATCAGTGACCTGAAGGAGGTGCCGCGGAAAAACATCACCCTCATTCGGGGTCTGGG | |
| | CCATGGCGCCTTTGGGGAGGTGTATGAAGGCCAGGTGTCCGGAATGCCCAACGACCCA | |
| | AGCCCCCTGCAAGTGGCTGTGAAGACGCTGCCTGAAGTGTGCTCTGAACAGGACGAAC | |
| | TGGATTTCCTCATGGAAGCCCTGATCATCAGCAAATTCAACCACCAGAACATTGTTCG | |
| | CTGCATTGGGGTGAGCCTGCAATCCCTGCCCCGGTTCATCCTGCTGGAGCTCATGGCG | |
| | GGGGGAGACCTCAAGTCCTTCCTCCGAGAGACCCGCCCTCGCCCGAGCCAGCCCTCCT | |
| | CCCTGGCCATGCTGGACCTTCTGCACGTGGCTCGGGACATTGCCTGTGGCTGTCAGTA | |
| | TTTGGAGGAAAACCACTTCATCCACCGAGACATTGCTGCCAGAAACTGCCTCTTGACC | |
| | TGTCCAGGCCCTGGAAGAGTGGCCAAGATTGGAGACTTCGGGATGGCCCGAGACATCT | |
| | ACAGGGCGAGCTACTATAGAAAGGGAGGCTGTGCCATGCTGCCAGTTAAGTGGATGCC | |
| | CCCAGAGGCCTTCATGGAAGGAATATTCACTTCTAAAACAGACACATGGTCCTTTGGA | |
| | GTGCTGCTATGGGAAATCTTTTCTCTTGGATATATGCCATACCCCAGCAAAAGCAACC | |
| | AGGAAGTTCTGGAGTTTGTCACCAGTGGAGGCCGGATGGACCCACCCAAGAACTGCCC | |
| | TGGGCCTGTATACCGGATAATGACTCAGTGCTGGCAACATCAGCCTGAAGACAGGCCC | |
| | AACTTTGCCATCATTTTGGAGAGGATTGAATACTGCACCCAGGACCCGGATGTAATCA | |
| | ACACCGCTTTGCCGATAGAATATGGTCCACTTGTGGAAGAGGAAGAGAAAGTGCCTGT | |
| | GAGGCCCAAGGACCCTGAGGGGGTTCCTCCTCTCCTGGTCTCTCAACAGGCAAAACGG | |
| | GAGGAGGAGCGCAGCCCAGCTGCCCCACCACCTCTGCCTACCACCTCCTCTGGCAAGG | |
| | CTGCAAAGAAACCCACAGCTGCAGAGATCTCTGTTCGAGTCCCTAGAGGGCCGGCCGT | |
| | GGAAGGGGGACACGTGAATATGGCATTCTCTCAGTCCAACCCTCCTTCGGAGTTGCAC | |
| | AAGGTCCACGGATCCAGAAACAAGCCCACCAGCTTGTGGAACCCAACGTACGGCTCCT | |
| | GGTTTACAGAGAAACCCACCAAAAAGAATAATCCTATAGCAAAGAAGGAGCCACACGA | |
| | CAGGGGTAACCTGGGGCTGGAGGGAAGCTGTACTGTCCCACCTAACGTTGCAACTGGG | |
| | AGACTTCCGGGGGCCTCACTGCTCCTAGAGCCCTCTTCGCTGACTGCCAATATGAAGG | |
| | AGGTACCTCTGTTCAGGCTACGTCACTTCCCTTGTGGGAATGTCAATTACGGCTACCA | |
| | GCAACAGGGCTTGCCCTTAGAAGCCGCTACTGCCCCTGGAGCTGGTCATTACGAGGAT | |
| | ACCATTCTGAAAAGCAAGAATAGCATGAACCAGCCTGGGCCCTGA | |
| ALK- | ATGATGAGCTTTGTGCAAAAGGGGAGCTGGCTACTTCTCGCTCTGCTTCATCCCACTA | 43 |
| COL3A1 | TTATTTTGGCACAACAGGAAGCTGTTGAAGGAGGATGTTCCCATCTTGGTCAGTCCTA | |
| | TGCGGATAGAGATGTCTGGAAGCCAGAACCATGCCAAATATGTGTCTGTGACTCAGGA | |
| | TCCGTTCTCTGCGATGACATAATATGTGACGATCAAGAATTAGACTGCCCCAACCCAG | |
| | AAATTCCATTTGGAGAATGTTGTGCAGTTTGCCCACAGCCTCCAACTGCTCCTACTCG | |
| | CCCTCCTAATGGTCAAGGACCTCAAGGCCCCAAGGGAGATCCAGGCCCTCCTGGTATT | |
| | CCTGGGAGAAATGGTGACCCTGGTATTCCAGGACAACCAGGGTCCCCTGGTTCTCCTG | |
| | GCCCCCCTGGAATCTGTGAATCATGCCCTACTGGTCCTCAGAACTATTCTCCCCAGTA | |
| | TGATTCATATGATGTCAAGTCTGGAGTAGCAGTAGGAGGACTCGCAGGCTATCCTGGA | |
| | CCAGCTGGCCCCCCAGGCCCTCCCGGTCCCCCTGGTACATCTGGTCATCCTGGTTCCC | |
| | CTGGATCTCCAGGATACCAAGGACCCCCTGGTGAACCTGGGCAAGCTGGTCCTTCAGG | |
| | CCCTCCAGGACCTCCTGGTGCTATAGGTCCATCTGGTCCTGCTGGAAAAGATGGAGAA | |
| | TCAGGTAGACCCGGACGACCTGGAGAGCGAGGATTGCCTGGACCTCCAGGTATCAAAG | |
| | GTCCAGCTGGGATACCTGGATTCCCTGGTATGAAAGGACACAGAGGCTTCGATGGACG | |
| | AAATGGAGAAAAGGGTGAAACAGGTGCTCCTGGATTAAAGGGTGAAAATGGTCTTCCA | |
| | GGCGAAAATGGAGCTCCTGGACCCATGGGTCCAAGAGGGGCTCCTGGTGAGCGAGGAC | |
| | GGCCAGGACTTCCTGGGGCTGCAGGTGCTCGGGGTAATGACGGTGCTCGAGGCAGTGA | |
| | TGGTCAACCAGGCCCTCCTGGTCCTCCTGGAACTGCCGGATTCCCTGGATCCCCTGGT | |
| | GCTAAGGGTGAAGTTGGACCTGCAGGGTCTCCTGGTTCAAATGGTGCCCCTGGACAAA | |
| | GAGGAGAACCTGGACCTCAGGGACACGCTGGTGCTCAAGGTCCTCCTGGCCCTCCTGG | |
| | GATTAATGGTAGTCCTGGTGGTAAAGGCGAAATGGGTCCCGCTGGCATTCCTGGAGCT | |
| | CCTGGACTGATGGGAGCCCGGGGTCCTCCAGGACCAGCCGGTGCTAATGGTGCTCCTG | |
| | GACTGCGAGGTGGTGCAGGTGAGCCTGGTAAGAATGGTGCCAAAGGAGAGCCCGGACC | |
| | ACGTGGTGAACGCGGTGAGGCTGGTATTCCAGGTGTTCCAGGAGCTAAAGGCGAAGAT | |
| | GGCAAGGATGGATCACCTGGAGAACCTGGTGCAAATGGGCTTCCAGGAGCTGCAGGAG | |
| | AAAGGGGTGCCCCTGGGTTCCGAGGACCTGCTGGACCAAATGGCATCCCAGGAGAAAA | |
| | GGGTCCTGCTGGAGAGCGTGGTGCTCCAGGCCCTGCAGGGCCCAGAGGAGCTGCTGGA | |
| | GAACCTGGCAGAGATGGCGTCCCTGGAGGTCCAGGAATGAGGGGCATGCCCGGAAGTC | |
| | CAGGAGGACCAGGAAGTGATGGGAAACCAGGGCCTCCCGGAAGTCAAGGAGAAAGTGG | |
| | TCGACCAGGTCCTCCTGGGCCATCTGGTCCCCGAGGTCAGCCTGGTGTCATGGGCTTC | |
| | CCCGGTCCTAAAGGAAATGATGGTGCTCCTGGTAAGAATGGAGAACGAGGTGGCCCTG | |
| | GAGGACCTGGCCCTCAGGGTCCTCCTGGAAAGAATGGTGAAACTGGACCTCAGGGACC | |
| | CCCAGGGCCTACTGGGCCTGGTGGTGACAAAGGAGACACAGGACCCCCTGGTCCACAA | |
| | GGATTACAAGGCTTGCCTGGTACAGGTGGTCCTCCAGGAGAAAATGGAAAACCTGGGG | |
| | AACCAGGTCCAAAGGGTGATGCCGGTGCACCTGGAGCTCCAGGAGGCAAGGGTGATGC | |
| | TGGTGCCCCTGGTGAACGTGGACCTCCTGGATTGGCAGGGGCCCCAGGACTTAGAGGT | |
| | GGAGCTGGTCCCCCTGGTCCCGAAGGAGGAAAGGGTGCTGCTGGTCCTCCTGGGCCAC | |
| | CTGGTGCTGCTGGTACTCCTGGTCTGCAAGGAATGCCTGGAGAAAGAGGAGGTCTTGG | |
| | AAGTCCTGGTCCAAAGGGTGACAAGGGTGAACCAGGCGGTCCAGGTGCTGATGGTGTC | |
| | CCAGGGAAAGATGGCCCAAGGGGTCCTACTGGTCCTATTGGTCCTCCTGGCCCAGCTG | |
| | GCCAGCCTGGAGATAAGGGTGAAGGTGGTGCCCCCGGACTTCCAGGTATAGCTGGACC | |
| | TCGTGGTAGCCCTGGTGAGAGAGGTGAAACTGGCCCTCCAGGACCTGCTGGTTTCCCT | |
| | GGTGCTCCTGGACAGAATGGTGAACCTGGTGGTAAAGGAGAAAGAGGGGCTCCGGGTG | |
| | AGAAAGGTGAAGGAGGCCCTCCTGGAGTTGCAGGACCCCCTGGAGGTTCTGGACCTGC | |
| | TGGTCCTCCTGGTCCCCAAGGTGTCAAAGGTGAACGTGGCAGTCCTGGTGGACCTGGT | |
| | GCTGCTGGCTTCCCTGGTGCTCGTGGTCTTCCTGGTCCTCCTGGTAGTAATGGTAACC | |
| | CAGGACCCCCAGGTCCCAGCGGTTCTCCAGGCAAGGATGGGCCCCCAGGTCCTGCGGG | |
| | TAACACTGGTGCTCCTGGCAGCCCTGGAGTGTCTGGACCAAAAGGTGATGCTGGCCAA | |
| | CCAGGAGAGAAGGGATCGCCTGGTGCCCAGGGCCCACCAGGAGCTCCAGGCCCACTTG | |
| | GGATTGCTGGGATCACTGGAGCACGGGGTCTTGCAGGACCACCAGGCATGCCAGGTCC | |
| | TAGGGGAAGCCCTGGCCCTCAGGGTGTCAAGGGTGAAAGTGGGAAACCAGGAGCTAAC | |
| | GGTCTCAGTGGAGAACGTGGTCCCCCTGGACCCCAGGGTCTTCCTGGTCTGGCTGGTA | |
| | CAGCTGGTGAACCTGGAAGAGATGGAAACCCTGGATCAGATGGTCTTCCAGGCCGAGA | |
| | TGGATCTCCTGGTGGCAAGGGTGATCGTGGTGAAAATGGCTCTCCTGGTGCCCCTGGC | |
| | GCTCCTGGTCATCCAGGCCCACCTGGTCCTGTCGGTCCAGCTGGAAAGAGTGGTGACA | |
| | GAGGAGAAAGTGGCCCTGCTGGCCCTGCTGGTGCTCCCGGTCCTGCTGGTTCCCGAGG | |
| | TGCTCCTGGTCCTCAAGGCCCACGTGGTGACAAAGGTGAAACAGGTGAACGTGGAGCT | |
| | GCTGGCATCAAAGGACATCGAGGATTCCCTGGTAATCCAGGTGCCCCAGGTTCTCCAG | |
| | GCCCTGCTGGTCAGCAGGGTGCAATCGGCAGTCCAGGACCTGCAGGCCCCAGAGGACC | |
| | TGTTGGACCCAGTGGACCTCCTGGCAAAGATGGAACCAGTGGACATCCAGGTCCCATT | |
| | GGACCACCAGGGCCTCGAGGTAACAGAGGTGAAAGAGGATCTGAGGGCTCCCCAGGCC | |
| | ACCCAGGGCAACCAGGCCCTCCTGGACCTCCTGGTGCCCCTGGTCCTTGCTGTGGTGG | |
| | TGTTGGAGCCGCTGCCATTGCTGGGATTGGAGGTGAAAAAGCTGGCGGTTTTGCCCCG | |
| | TATTATGGAGATGAACCAATGGATTTCAAAATCAACACCGATGAGATTATGACTTCAC | |
| | TCAAGTCTGTTAATGGACAAATAGAAAGCCTCATTAGTCCTGATGGTTCTCGTAAAAA | |
| | CCCCGCTAGAAACTGCAGAGACCTGAAATTCTGCCATCCTGAACTCAAGAGTGTGTCA | |
| | CCCACCCCGGAGCCACACCTGCCACTCTCGCTGATCCTCTCTGTGGTGACCTCTGCCC | |
| | TCGTGGCCGCCCTGGTCCTGGCTTTCTCCGGCATCATGATTGTGTACCGCCGGAAGCA | |
| | CCAGGAGCTGCAAGCCATGCAGATGGAGCTGCAGAGCCCTGAGTACAAGCTGAGCAAG | |
| | CTCCGCACCTCGACCATCATGACCGACTACAACCCCAACTACTGCTTTGCTGGCAAGA | |
| | CCTCCTCCATCAGTGACCTGAAGGAGGTGCCGCGGAAAAACATCACCCTCATTCGGGG | |
| | TCTGGGCCATGGCGCCTTTGGGGAGGTGTATGAAGGCCAGGTGTCCGGAATGCCCAAC | |
| | GACCCAAGCCCCCTGCAAGTGGCTGTGAAGACGCTGCCTGAAGTGTGCTCTGAACAGG | |
| | ACGAACTGGATTTCCTCATGGAAGCCCTGATCATCAGCAAATTCAACCACCAGAACAT | |
| | TGTTCGCTGCATTGGGGTGAGCCTGCAATCCCTGCCCCGGTTCATCCTGCTGGAGCTC | |
| | ATGGCGGGGGGAGACCTCAAGTCCTTCCTCCGAGAGACCCGCCCTCGCCCGAGCCAGC | |
| | CCTCCTCCCTGGCCATGCTGGACCTTCTGCACGTGGCTCGGGACATTGCCTGTGGCTG | |
| | TCAGTATTTGGAGGAAAACCACTTCATCCACCGAGACATTGCTGCCAGAAACTGCCTC | |
| | TTGACCTGTCCAGGCCCTGGAAGAGTGGCCAAGATTGGAGACTTCGGGATGGCCCGAG | |
| | ACATCTACAGGGCGAGCTACTATAGAAAGGGAGGCTGTGCCATGCTGCCAGTTAAGTG | |
| | GATGCCCCCAGAGGCCTTCATGGAAGGAATATTCACTTCTAAAACAGACACATGGTCC | |
| | TTTGGAGTGCTGCTATGGGAAATCTTTTCTCTTGGATATATGCCATACCCCAGCAAAA | |
| | GCAACCAGGAAGTTCTGGAGTTTGTCACCAGTGGAGGCCGGATGGACCCACCCAAGAA | |
| | CTGCCCTGGGCCTGTATACCGGATAATGACTCAGTGCTGGCAACATCAGCCTGAAGAC | |
| | AGGCCCAACTTTGCCATCATTTTGGAGAGGATTGAATACTGCACCCAGGACCCGGATG | |
| | TAATCAACACCGCTTTGCCGATAGAATATGGTCCACTTGTGGAAGAGGAAGAGAAAGT | |
| | GCCTGTGAGGCCCAAGGACCCTGAGGGGGTTCCTCCTCTCCTGGTCTCTCAACAGGCA | |
| | AAACGGGAGGAGGAGCGCAGCCCAGCTGCCCCACCACCTCTGCCTACCACCTCCTCTG | |
| | GCAAGGCTGCAAAGAAACCCACAGCTGCAGAGATCTCTGTTCGAGTCCCTAGAGGGCC | |
| | GGCCGTGGAAGGGGGACACGTGAATATGGCATTCTCTCAGTCCAACCCTCCTTCGGAG | |
| | TTGCACAAGGTCCACGGATCCAGAAACAAGCCCACCAGCTTGTGGAACCCAACGTACG | |
| | GCTCCTGGTTTACAGAGAAACCCACCAAAAAGAATAATCCTATAGCAAAGAAGGAGCC | |
| | ACACGACAGGGGTAACCTGGGGCTGGAGGGAAGCTGTACTGTCCCACCTAACGTTGCA | |
| | ACTGGGAGACTTCCGGGGGCCTCACTGCTCCTAGAGCCCTCTTCGCTGACTGCCAATA | |
| | TGAAGGAGGTACCTCTGTTCAGGCTACGTCACTTCCCTTGTGGGAATGTCAATTACGG | |
| | CTACCAGCAACAGGGCTTGCCCTTAGAAGCCGCTACTGCCCCTGGAGCTGGTCATTAC | |
| | GAGGATACCATTCTGAAAAGCAAGAATAGCATGAACCAGCCTGGGCCCTGA | |

[0236] In some embodiments, the ALK-COL3A1 fusion nucleic acid molecule of the disclosure comprises the nucleotide sequence of SEQ ID NO: 1, or a nucleotide sequence with at least about 70% (e.g., any of about 70%, 71%, 72%, 73%, 74%, 75%, 76%, 77%, 78%, 79%, 80%, 81%, 82%, 83%, 84%, 85%, 86%, 87%, 88%, 89%, 90%, 91%, 92%, 93%, 94%, 95%, 96%, 97%, 98%, 99%, or 100%) sequence homology thereto. In some embodiments, the ALK-CDC42BPA fusion nucleic acid molecule of the disclosure comprises the nucleotide sequence of SEQ ID NO: 2, or a nucleotide sequence with at least about 70% (e.g., any of about 70%, 71%, 72%, 73%, 74%, 75%, 76%, 77%, 78%, 79%, 80%, 81%, 82%, 83%, 84%, 85%, 86%, 87%, 88%, 89%, 90%, 91%, 92%, 93%, 94%, 95%, 96%, 97%, 98%, 99%, or 100%) sequence homology thereto. In some embodiments, the ALK-EPHA2 fusion nucleic acid molecule of the disclosure comprises the nucleotide sequence of SEQ ID NO: 3, or a nucleotide sequence with at least about 70% (e.g., any of about 70%, 71%, 72%, 73%, 74%, 75%, 76%, 77%, 78%, 79%, 80%, 81%, 82%, 83%, 84%, 85%, 86%, 87%, 88%, 89%, 90%, 91%, 92%, 93%, 94%, 95%, 96%, 97%, 98%, 99%, or 100%) sequence homology thereto. In some embodiments, the ALK-MYO5C fusion nucleic acid molecule of the disclosure comprises the nucleotide sequence of SEQ ID NO: 4, or a nucleotide sequence with at least about 70% (e.g., any of about 70%, 71%, 72%, 73%, 74%, 75%, 76%, 77%, 78%, 79%, 80%, 81%, 82%, 83%, 84%, 85%, 86%, 87%, 88%, 89%, 90%, 91%, 92%, 93%, 94%, 95%, 96%, 97%, 98%, 99%, or 100%) sequence homology thereto. In some embodiments, the ALK-TRIM24 fusion nucleic acid molecule of the disclosure comprises the nucleotide sequence of SEQ ID NO: 5, or a nucleotide sequence with at least about 70% (e.g., any of about 70%, 71%, 72%, 73%, 74%, 75%, 76%, 77%, 78%, 79%, 80%, 81%, 82%, 83%, 84%, 85%, 86%, 87%, 88%, 89%, 90%, 91%, 92%, 93%, 94%, 95%, 96%, 97%, 98%, 99%, or 100%) sequence homology thereto. In some embodiments, the ALK-SKAP1 fusion nucleic acid molecule of the disclosure comprises the nucleotide sequence of SEQ ID NO: 6, or a nucleotide sequence with at least about 70% (e.g., any of about 70%, 71%, 72%, 73%, 74%, 75%, 76%, 77%, 78%, 79%, 80%, 81%, 82%, 83%, 84%, 85%, 86%, 87%, 88%, 89%, 90%, 91%, 92%, 93%, 94%, 95%, 96%, 97%, 98%, 99%, or 100%) sequence homology thereto. In some embodiments, the ALK-UBE3B fusion nucleic acid molecule of the disclosure comprises the nucleotide sequence of SEQ ID NO: 7, or a nucleotide sequence with at least about 70% (e.g., any of about 70%, 71%, 72%, 73%, 74%, 75%, 76%, 77%, 78%, 79%, 80%, 81%, 82%, 83%, 84%, 85%, 86%, 87%, 88%, 89%, 90%, 91%, 92%, 93%, 94%, 95%, 96%, 97%, 98%, 99%, or 100%) sequence homology thereto. In some embodiments, the ALK-TNS3 fusion nucleic acid molecule of the disclosure comprises the nucleotide sequence of SEQ ID NO: 8, or a nucleotide sequence with at least about 70% (e.g., any of about 70%, 71%, 72%, 73%, 74%, 75%, 76%, 77%, 78%, 79%, 80%, 81%, 82%, 83%, 84%, 85%, 86%, 87%, 88%, 89%, 90%, 91%, 92%, 93%, 94%, 95%, 96%, 97%, 98%, 99%, or 100%) sequence homology thereto. In some embodiments, the ALK-C2orf73 fusion nucleic acid molecule of the disclosure comprises the nucleotide sequence of SEQ ID NO: 9, or a nucleotide sequence with at least about 70% (e.g., any of about 70%, 71%, 72%, 73%, 74%, 75%, 76%, 77%, 78%, 79%, 80%, 81%, 82%, 83%, 84%, 85%, 86%, 87%, 88%, 89%, 90%, 91%, 92%, 93%, 94%, 95%, 96%, 97%, 98%, 99%, or 100%) sequence homology thereto. In some embodiments, the ALK-AZI2 fusion nucleic acid molecule of the disclosure comprises the nucleotide sequence of SEQ ID NO: 10, or a nucleotide sequence with at least about 70% (e.g., any of about 70%, 71%, 72%, 73%, 74%, 75%, 76%, 77%, 78%, 79%, 80%, 81%, 82%, 83%, 84%, 85%, 86%, 87%, 88%, 89%, 90%, 91%, 92%, 93%, 94%, 95%, 96%, 97%, 98%, 99%, or 100%) sequence homology thereto. In some embodiments, the ALK-MANBA fusion nucleic acid molecule of the disclosure comprises the nucleotide sequence of SEQ ID NO: 11, or a nucleotide sequence with at least about 70% (e.g., any of about 70%, 71%, 72%, 73%, 74%, 75%, 76%, 77%, 78%, 79%, 80%, 81%, 82%, 83%, 84%, 85%, 86%, 87%, 88%, 89%, 90%, 91%, 92%, 93%, 94%, 95%, 96%, 97%, 98%, 99%, or 100%) sequence homology thereto. In some embodiments, the ALK-CNTNAP5 fusion nucleic acid molecule of the disclosure comprises the nucleotide sequence of SEQ ID NO: 12, or a nucleotide sequence with at least about 70% (e.g., any of about 70%, 71%, 72%, 73%, 74%, 75%, 76%, 77%, 78%, 79%, 80%, 81%, 82%, 83%, 84%, 85%, 86%, 87%, 88%, 89%, 90%, 91%, 92%, 93%, 94%, 95%, 96%, 97%, 98%, 99%, or 100%) sequence homology thereto. In some embodiments, the ALK-TANGO6 fusion nucleic acid molecule of the disclosure comprises the nucleotide sequence of SEQ ID NO: 14, or a nucleotide sequence with at least about 70% (e.g., any of about 70%, 71%, 72%, 73%, 74%, 75%, 76%, 77%, 78%, 79%, 80%, 81%, 82%, 83%, 84%, 85%, 86%, 87%, 88%, 89%, 90%, 91%, 92%, 93%, 94%, 95%, 96%, 97%, 98%, 99%, or 100%) sequence homology thereto. In some embodiments, the ALK-NFIA fusion nucleic acid molecule of the disclosure comprises the nucleotide sequence of SEQ ID NO: 15, or a nucleotide sequence with at least about 70% (e.g., any of about 70%, 71%, 72%, 73%, 74%, 75%, 76%, 77%, 78%, 79%, 80%, 81%, 82%, 83%, 84%, 85%, 86%, 87%, 88%, 89%, 90%, 91%, 92%, 93%, 94%, 95%, 96%, 97%, 98%, 99%, or 100%) sequence homology thereto. In some embodiments, the ALK-RPS6KA5 fusion nucleic acid molecule of the disclosure comprises the nucleotide sequence of SEQ ID NO: 16, or a nucleotide sequence with at least about 70% (e.g., any of about 70%, 71%, 72%, 73%, 74%, 75%, 76%, 77%, 78%, 79%, 80%, 81%, 82%, 83%, 84%, 85%, 86%, 87%, 88%, 89%, 90%, 91%, 92%, 93%, 94%, 95%, 96%, 97%, 98%, 99%, or 100%) sequence homology thereto. In some embodiments, the ALK-TG fusion nucleic acid molecule of the disclosure comprises the nucleotide sequence of SEQ ID NO: 17, or a nucleotide sequence with at least about 70% (e.g., any of about 70%, 71%, 72%, 73%, 74%, 75%, 76%, 77%, 78%, 79%, 80%, 81%, 82%, 83%, 84%, 85%, 86%, 87%, 88%, 89%, 90%, 91%, 92%, 93%, 94%, 95%, 96%, 97%, 98%, 99%, or 100%) sequence homology thereto. In some embodiments, the ALK-LRRFIP2 fusion nucleic acid molecule of the disclosure comprises the nucleotide sequence of SEQ ID NO: 18, or a nucleotide sequence with at least about 70% (e.g., any of about 70%, 71%, 72%, 73%, 74%, 75%, 76%, 77%, 78%, 79%, 80%, 81%, 82%, 83%, 84%, 85%, 86%, 87%, 88%, 89%, 90%, 91%, 92%, 93%, 94%, 95%, 96%, 97%, 98%, 99%, or 100%) sequence homology thereto. In some embodiments, the ALK-MYO5C fusion nucleic acid molecule of the disclosure comprises the nucleotide sequence of SEQ ID NO: 19, or a nucleotide sequence with at least about 70% (e.g., any of about 70%, 71%, 72%, 73%, 74%, 75%, 76%, 77%, 78%, 79%, 80%, 81%, 82%, 83%, 84%, 85%, 86%, 87%, 88%, 89%, 90%, 91%, 92%, 93%, 94%, 95%, 96%, 97%, 98%, 99%, or 100%) sequence homology thereto. In some embodiments, the ALK-AGAP1 fusion nucleic acid molecule of the disclosure comprises the nucleotide sequence of SEQ ID NO: 20, or a nucleotide sequence with at least about 70% (e.g., any of about 70%, 71%, 72%, 73%, 74%, 75%, 76%, 77%, 78%, 79%, 80%, 81%, 82%, 83%, 84%, 85%, 86%, 87%, 88%, 89%, 90%, 91%, 92%, 93%, 94%, 95%, 96%, 97%, 98%, 99%, or 100%) sequence homology thereto. In some embodiments, the ALK-MED13L fusion nucleic acid molecule of the disclosure comprises the nucleotide sequence of SEQ ID NO: 21, or a nucleotide sequence with at least about 70% (e.g., any of about 70%, 71%, 72%, 73%, 74%, 75%, 76%, 77%, 78%, 79%, 80%, 81%, 82%, 83%, 84%, 85%, 86%, 87%, 88%, 89%, 90%, 91%, 92%, 93%, 94%, 95%, 96%, 97%, 98%, 99%, or 100%) sequence homology thereto. In some embodiments, the ALK-MTBP fusion nucleic acid molecule of the disclosure comprises the nucleotide sequence of SEQ ID NO: 22, or a nucleotide sequence with at least about 70% (e.g., any of about 70%, 71%, 72%, 73%, 74%, 75%, 76%, 77%, 78%, 79%, 80%, 81%, 82%, 83%, 84%, 85%, 86%, 87%, 88%, 89%, 90%, 91%, 92%, 93%, 94%, 95%, 96%, 97%, 98%, 99%, or 100%) sequence homology thereto. In some embodiments, the ALK-SLC30A6 fusion nucleic acid molecule of the disclosure comprises the nucleotide sequence of SEQ ID NO: 24, or a nucleotide sequence with at least about 70% (e.g., any of about 70%, 71%, 72%, 73%, 74%, 75%, 76%, 77%, 78%, 79%, 80%, 81%, 82%, 83%, 84%, 85%, 86%, 87%, 88%, 89%, 90%, 91%, 92%, 93%, 94%, 95%, 96%, 97%, 98%, 99%, or 100%) sequence homology thereto. In some embodiments, the ALK-GMCL1 fusion nucleic acid molecule of the disclosure comprises the nucleotide sequence of SEQ ID NO: 25, or a nucleotide sequence with at least about 70% (e.g., any of about 70%, 71%, 72%, 73%, 74%, 75%, 76%, 77%, 78%, 79%, 80%, 81%, 82%, 83%, 84%, 85%, 86%, 87%, 88%, 89%, 90%, 91%, 92%, 93%, 94%, 95%, 96%, 97%, 98%, 99%, or 100%) sequence homology thereto. In some embodiments, the ALK-AGAP1 fusion nucleic acid molecule of the disclosure comprises the nucleotide sequence of SEQ ID NO: 26, or a nucleotide sequence with at least about 70% (e.g., any of about 70%, 71%, 72%, 73%, 74%, 75%, 76%, 77%, 78%, 79%, 80%, 81%, 82%, 83%, 84%, 85%, 86%, 87%, 88%, 89%, 90%, 91%, 92%, 93%, 94%, 95%, 96%, 97%, 98%, 99%, or 100%) sequence homology thereto. In some embodiments, the ALK-ZNF454 fusion nucleic acid molecule of the disclosure comprises the nucleotide sequence of SEQ ID NO: 27, or a nucleotide sequence with at least about 70% (e.g., any of about 70%, 71%, 72%, 73%, 74%, 75%, 76%, 77%, 78%, 79%, 80%, 81%, 82%, 83%, 84%, 85%, 86%, 87%, 88%, 89%, 90%, 91%, 92%, 93%, 94%, 95%, 96%, 97%, 98%, 99%, or 100%) sequence homology thereto. In some embodiments, the ALK-TTC28 fusion nucleic acid molecule of the disclosure comprises the nucleotide sequence of SEQ ID NO: 28, or a nucleotide sequence with at least about 70% (e.g., any of about 70%, 71%, 72%, 73%, 74%, 75%, 76%, 77%, 78%, 79%, 80%, 81%, 82%, 83%, 84%, 85%, 86%, 87%, 88%, 89%, 90%, 91%, 92%, 93%, 94%, 95%, 96%, 97%, 98%, 99%, or 100%) sequence homology thereto. In some embodiments, the ALK-NINJ2 fusion nucleic acid molecule of the disclosure comprises the nucleotide sequence of SEQ ID NO: 29, or a nucleotide sequence with at least about 70% (e.g., any of about 70%, 71%, 72%, 73%, 74%, 75%, 76%, 77%, 78%, 79%, 80%, 81%, 82%, 83%, 84%, 85%, 86%, 87%, 88%, 89%, 90%, 91%, 92%, 93%, 94%, 95%, 96%, 97%, 98%, 99%, or 100%) sequence homology thereto. In some embodiments, the ALK-UTRN fusion nucleic acid molecule of the disclosure comprises the nucleotide sequence of SEQ ID NO: 30, or a nucleotide sequence with at least about 70% (e.g., any of about 70%, 71%, 72%, 73%, 74%, 75%, 76%, 77%, 78%, 79%, 80%, 81%, 82%, 83%, 84%, 85%, 86%, 87%, 88%, 89%, 90%, 91%, 92%, 93%, 94%, 95%, 96%, 97%, 98%, 99%, or 100%) sequence homology thereto. In some embodiments, the ALK-ACTN4 fusion nucleic acid molecule of the disclosure comprises the nucleotide sequence of SEQ ID NO: 31, or a nucleotide sequence with at least about 70% (e.g., any of about 70%, 71%, 72%, 73%, 74%, 75%, 76%, 77%, 78%, 79%, 80%, 81%, 82%, 83%, 84%, 85%, 86%, 87%, 88%, 89%, 90%, 91%, 92%, 93%, 94%, 95%, 96%, 97%, 98%, 99%, or 100%) sequence homology thereto. In some embodiments, the ALK-CPSF7 fusion nucleic acid molecule of the disclosure comprises the nucleotide sequence of SEQ ID NO: 32, or a nucleotide sequence with at least about 70% (e.g., any of about 70%, 71%, 72%, 73%, 74%, 75%, 76%, 77%, 78%, 79%, 80%, 81%, 82%, 83%, 84%, 85%, 86%, 87%, 88%, 89%, 90%, 91%, 92%, 93%, 94%, 95%, 96%, 97%, 98%, 99%, or 100%) sequence homology thereto. In some embodiments, the ALK-SLC25A13 fusion nucleic acid molecule of the disclosure comprises the nucleotide sequence of SEQ ID NO: 33, or a nucleotide sequence with at least about 70% (e.g., any of about 70%, 71%, 72%, 73%, 74%, 75%, 76%, 77%, 78%, 79%, 80%, 81%, 82%, 83%, 84%, 85%, 86%, 87%, 88%, 89%, 90%, 91%, 92%, 93%, 94%, 95%, 96%, 97%, 98%, 99%, or 100%) sequence homology thereto. In some embodiments, the ALK-CTNND1 fusion nucleic acid molecule of the disclosure comprises the nucleotide sequence of SEQ ID NO: 34, or a nucleotide sequence with at least about 70% (e.g., any of about 70%, 71%, 72%, 73%, 74%, 75%, 76%, 77%, 78%, 79%, 80%, 81%, 82%, 83%, 84%, 85%, 86%, 87%, 88%, 89%, 90%, 91%, 92%, 93%, 94%, 95%, 96%, 97%, 98%, 99%, or 100%) sequence homology thereto. In some embodiments, the ALK-KLC4 fusion nucleic acid molecule of the disclosure comprises the nucleotide sequence of SEQ ID NO: 35, or a nucleotide sequence with at least about 70% (e.g., any of about 70%, 71%, 72%, 73%, 74%, 75%, 76%, 77%, 78%, 79%, 80%, 81%, 82%, 83%, 84%, 85%, 86%, 87%, 88%, 89%, 90%, 91%, 92%, 93%, 94%, 95%, 96%, 97%, 98%, 99%, or 100%) sequence homology thereto. In some embodiments, the ALK-BTBD9 fusion nucleic acid molecule of the disclosure comprises the nucleotide sequence of SEQ ID NO: 36, or a nucleotide sequence with at least about 70% (e.g., any of about 70%, 71%, 72%, 73%, 74%, 75%, 76%, 77%, 78%, 79%, 80%, 81%, 82%, 83%, 84%, 85%, 86%, 87%, 88%, 89%, 90%, 91%, 92%, 93%, 94%, 95%, 96%, 97%, 98%, 99%, or 100%) sequence homology thereto.

[0237] In some embodiments, the ALK-CPQ fusion nucleic acid molecule of the disclosure comprises the nucleotide sequence of SEQ ID NO: 38, or a nucleotide sequence with at least about 70% (e.g., any of about 70%, 71%, 72%, 73%, 74%, 75%, 76%, 77%, 78%, 79%, 80%, 81%, 82%, 83%, 84%, 85%, 86%, 87%, 88%, 89%, 90%, 91%, 92%, 93%, 94%, 95%, 96%, 97%, 98%, 99%, or 100%) sequence homology thereto. In some embodiments, the ALK-KIFSC fusion nucleic acid molecule of the disclosure comprises the nucleotide sequence of SEQ ID NO: 40, or a nucleotide sequence with at least about 70% (e.g., any of about 70%, 71%, 72%, 73%, 74%, 75%, 76%, 77%, 78%, 79%, 80%, 81%, 82%, 83%, 84%, 85%, 86%, 87%, 88%, 89%, 90%, 91%, 92%, 93%, 94%, 95%, 96%, 97%, 98%, 99%, or 100%) sequence homology thereto. In some embodiments, the ALK-MAGOHB fusion nucleic acid molecule of the disclosure comprises the nucleotide sequence of SEQ ID NO: 41, or a nucleotide sequence with at least about 70% (e.g., any of about 70%, 71%, 72%, 73%, 74%, 75%, 76%, 77%, 78%, 79%, 80%, 81%, 82%, 83%, 84%, 85%, 86%, 87%, 88%, 89%, 90%, 91%, 92%, 93%, 94%, 95%, 96%, 97%, 98%, 99%, or 100%) sequence homology thereto. In some embodiments, the ALK-COL3A1 fusion nucleic acid molecule of the disclosure comprises the nucleotide sequence of SEQ ID NO: 43, or a nucleotide sequence with at least about 70% (e.g., any of about 70%, 71%, 72%, 73%, 74%, 75%, 76%, 77%, 78%, 79%, 80%, 81%, 82%, 83%, 84%, 85%, 86%, 87%, 88%, 89%, 90%, 91%, 92%, 93%, 94%, 95%, 96%, 97%, 98%, 99%, or 100%) sequence homology thereto.

[0238] In some embodiments of any of the ALK fusion nucleic acid molecules provided herein, the fusion nucleic acid molecule is a genomic nucleic acid molecule (i.e., genomic DNA or fragments thereof), or a transcribed nucleic acid molecule, e.g., an RNA such as mRNA, or a cDNA, or fragments thereof.

### (ii) ALK Fusion Polypeptides

[0239] In certain aspects, provided herein are ALK fusion polypeptides which comprise at least a portion of an ALK polypeptide and at least a portion of a polypeptide encoded by another gene. In some embodiments, an ALK fusion polypeptide of the disclosure is a fusion polypeptide encoded by any of the ALK fusion nucleic acid molecules provided herein, or a portion thereof.

[0240] In some aspects, provided herein are ALK fusion polypeptides that comprise at least a portion of an ALK polypeptide and at least a portion of a polypeptide encoded by another gene, e.g., an ABCB11, ACTN4, AGAP1, APH1A, AZI2, BTBD9, C2orf73, CAPN14, CARMIL1, CASP8, CDC42BPA, CIB4, CNTNAP5, COL3A1, CPQ, CPSF7, CREBBP, CTBP1, CTNND1, CYP51A1, CYS1, EPHA2, FHOD3, FILIP1L, GMCL1, GPN1, GPR113, HADHA, HS1BP3, INTS9, ITGA6, KCTD18, KIF5C, KLC4, LINC00535, LRRFIP2, MAGOHB, MAMDC4, MANBA, MAP3K9, MED13L, METTL25, MTBP, MYH10, MYO5C, NFIA, NINJ2, OPRM1, OTX1, PAQR4, PDCD10, PDE3A, PELI1, PLEC, PTGER4, PTPRJ, QKI, RPS6KA5, SASH1, SEC16B, SKAP1, SLC25A13, SLC30A6, SNX17, SOX13, SRSF7, TANGO6, TG, TMCO3, TNS3, TRIM24, TTC28, UBE2L3, UBE3B, UTRN, VASP, WDR92, YPEL5, ZNF446, ZNF454, ZNF513, or ZSWIM2 gene, or a gene listed in Table 1. For example, in some embodiments, provided herein are fusion polypeptides encoded by an ALK-ABCB11, ALK-ACTN4, ALK-AGAP1, ALK-APH1A, ALK-AZI2, ALK-BTBD9, ALK-C2orf73, ALK-CAPN14, ALK-CARMIL1, ALK-CASP8, ALK-CDC42BPA, ALK-CIB4, ALK-CNTNAP5, ALK-COL3A1, ALK-CPQ, ALK-CPSF7, ALK-CREBBP, ALK-CTBP1, ALK-CTNND1, ALK-CYP51A1, ALK-CYS1, ALK-EPHA2, ALK-FHOD3, ALK-FILIP1L, ALK-GMCL1, ALK-GPN1, ALK-GPR113, ALK-HADHA, ALK-HS1BP3, ALK-INTS9, ALK-ITGA6, ALK-KCTD18, ALK-KIF5C, ALK-KLC4, ALK-LINC00535, ALK-LRRFIP2, ALK-MAGOHB, ALK-MAMDC4, ALK-MANBA, ALK-MAP3K9, ALK-MED13L, ALK-METTL25, ALK-MTBP, ALK-MYH10, ALK-MYO5C, ALK-NFIA, ALK-NINJ2, ALK-OPRM1, ALK-OTX1, ALK-PAQR4, ALK-PDCD10, ALK-PDE3A, ALK-PELI1, ALK-PLEC, ALK-PTGER4, ALK-PTPRJ, ALK-QKI, ALK-RPS6KA5, ALK-SASH1, ALK-SEC16B, ALK-SKAP1, ALK-SLC25A13, ALK-SLC30A6, ALK-SNX17, ALK-SOX13, ALK-SRSF7, ALK-TANGO6, ALK-TG, ALK-TMCO3, ALK-TNS3, ALK-TRIM24, ALK-TTC28, ALK-UBE2L3, ALK-UBE3B, ALK-UTRN, ALK-VASP, ALK-WDR92, ALK-YPEL5, ALK-ZNF446, ALK-ZNF454, ALK-ZNF513, or ALK-ZSWIM2 fusion nucleic acid molecule of the disclosure. In some embodiments, provided herein are ALK fusion polypeptides encoded by any of the ALK fusion nucleic acid molecules as described herein and/or in any of Tables 1-7, and/or in the Examples herein. In some embodiments, the ALK fusion polypeptide comprises an ALK kinase domain, or a fragment of an ALK kinase domain having ALK kinase activity. In some embodiments, the ALK fusion polypeptide has ALK kinase activity. In some embodiments, the kinase activity is constitutive. In some embodiments, the ALK fusion polypeptide is oncogenic. In some embodiments, the ALK fusion polypeptide promotes cancer cell survival, angiogenesis, cancer cell proliferation, and any combination thereof.

[0241] In some embodiments, the ALK-ABCB11 fusion polypeptide of the disclosure comprises, in the amino-terminus to carboxyl-terminus direction, an ABCB11 polypeptide or a portion thereof fused to an ALK polypeptide or a portion thereof. In some embodiments, the ALK-ACTN4 fusion polypeptide of the disclosure comprises, in the amino-terminus to carboxyl-terminus direction, an ACTN4 polypeptide or a portion thereof fused to an ALK polypeptide or a portion thereof. In some embodiments, the ALK-AGAP1 fusion polypeptide of the disclosure comprises, in the amino-terminus to carboxyl-terminus direction, an AGAP1 polypeptide or a portion thereof fused to an ALK polypeptide or a portion thereof. In some embodiments, the ALK-AGAP1 fusion polypeptide of the disclosure comprises, in the amino-terminus to carboxyl-terminus direction, an ALK polypeptide or a portion thereof fused to an AGAP1 polypeptide or a portion thereof. In some embodiments, the ALK-APH1A fusion polypeptide of the disclosure comprises, in the amino-terminus to carboxyl-terminus direction, an ALK polypeptide or a portion thereof fused to an APH1A polypeptide or a portion thereof. In some embodiments, the ALK-AZI2 fusion polypeptide of the disclosure comprises, in the amino-terminus to carboxyl-terminus direction, an AZI2 polypeptide or a portion thereof fused to an ALK polypeptide or a portion thereof. In some embodiments, the ALK-BTBD9 fusion polypeptide of the disclosure comprises, in the amino-terminus to carboxyl-terminus direction, a BTBD9 polypeptide or a portion thereof fused to an ALK polypeptide or a portion thereof. In some embodiments, the ALK-C2orf73 fusion polypeptide of the disclosure comprises, in the amino-terminus to carboxyl-terminus direction, a C2orf73 polypeptide or a portion thereof fused to an ALK polypeptide or a portion thereof. In some embodiments, the ALK-CAPN14 fusion polypeptide of the disclosure comprises, in the amino-terminus to carboxyl-terminus direction, an ALK polypeptide or a portion thereof fused to a CAPN14 polypeptide or a portion thereof. In some embodiments, the ALK-CARMIL1 fusion polypeptide of the disclosure comprises, in the amino-terminus to carboxyl-terminus direction, a CARMIL1 polypeptide or a portion thereof fused to an ALK polypeptide or a portion thereof. In some embodiments, the ALK-CASP8 fusion polypeptide of the disclosure comprises, in the amino-terminus to carboxyl-terminus direction, a CASP8 polypeptide or a portion thereof fused to an ALK polypeptide or a portion thereof. In some embodiments, the ALK-CDC42BPA fusion polypeptide of the disclosure comprises, in the amino-terminus to carboxyl-terminus direction, a CDC42BPA polypeptide or a portion thereof fused to an ALK polypeptide or a portion thereof. In some embodiments, the ALK-CIB4 fusion polypeptide of the disclosure comprises, in the amino-terminus to carboxyl-terminus direction, a CIB4 polypeptide or a portion thereof fused to an ALK polypeptide or a portion thereof. In some embodiments, the ALK-CNTNAP5 fusion polypeptide of the disclosure comprises, in the amino-terminus to carboxyl-terminus direction, a CNTNAP5 polypeptide or a portion thereof fused to an ALK polypeptide or a portion thereof. In some embodiments, the ALK-COL3A1 fusion polypeptide of the disclosure comprises, in the amino-terminus to carboxyl-terminus direction, a COL3A1 polypeptide or a portion thereof fused to an ALK polypeptide or a portion thereof. In some embodiments, the ALK-CPQ fusion polypeptide of the disclosure comprises, in the amino-terminus to carboxyl-terminus direction, a CPQ polypeptide or a portion thereof fused to an ALK polypeptide or a portion thereof. In some embodiments, the ALK-CPSF7 fusion polypeptide of the disclosure comprises, in the amino-terminus to carboxyl-terminus direction, a CPSF7 polypeptide or a portion thereof fused to an ALK polypeptide or a portion thereof. In some embodiments, the ALK-CREBBP fusion polypeptide of the disclosure comprises, in the amino-terminus to carboxyl-terminus direction, an ALK polypeptide or a portion thereof fused to a CREBBP polypeptide or a portion thereof. In some embodiments, the ALK-CTBP1 fusion polypeptide of the disclosure comprises, in the amino-terminus to carboxyl-terminus direction, a CTBP1 polypeptide or a portion thereof fused to an ALK polypeptide or a portion thereof. In some embodiments, the ALK-CTNND1 fusion polypeptide of the disclosure comprises, in the amino-terminus to carboxyl-terminus direction, a CTNND1 polypeptide or a portion thereof fused to an ALK polypeptide or a portion thereof. In some embodiments, the ALK-CYP51A1 fusion polypeptide of the disclosure comprises, in the amino-terminus to carboxyl-terminus direction, a CYP51A1 polypeptide or a portion thereof fused to an ALK polypeptide or a portion thereof. In some embodiments, the ALK-CYS1 fusion polypeptide of the disclosure comprises, in the amino-terminus to carboxyl-terminus direction, a CYS1 polypeptide or a portion thereof fused to an ALK polypeptide or a portion thereof. In some embodiments, the ALK-EPHA2 fusion polypeptide of the disclosure comprises, in the amino-terminus to carboxyl-terminus direction, an EPHA2 polypeptide or a portion thereof fused to an ALK polypeptide or a portion thereof. In some embodiments, the ALK-FHOD3 fusion polypeptide of the disclosure comprises, in the amino-terminus to carboxyl-terminus direction, an ALK polypeptide or a portion thereof fused to a FHOD3 polypeptide or a portion thereof. In some embodiments, the ALK-GMCL1 fusion polypeptide of the disclosure comprises, in the amino-terminus to carboxyl-terminus direction, an ALK polypeptide or a portion thereof fused to a GMCL1 polypeptide or a portion thereof. In some embodiments, the ALK-GPN1 fusion polypeptide of the disclosure comprises, in the amino-terminus to carboxyl-terminus direction, a GPN1 polypeptide or a portion thereof fused to an ALK polypeptide or a portion thereof. In some embodiments, the ALK-GPR113 fusion polypeptide of the disclosure comprises, in the amino-terminus to carboxyl-terminus direction, a GPR113 polypeptide or a portion thereof fused to an ALK polypeptide or a portion thereof. In some embodiments, the ALK-HADHA fusion polypeptide of the disclosure comprises, in the amino-terminus to carboxyl-terminus direction, a HADHA polypeptide or a portion thereof fused to an ALK polypeptide or a portion thereof. In some embodiments, the ALK-HS1BP3 fusion polypeptide of the disclosure comprises, in the amino-terminus to carboxyl-terminus direction, an ALK polypeptide or a portion thereof fused to an HS1BP3 polypeptide or a portion thereof. In some embodiments, the ALK-INTS9 fusion polypeptide of the disclosure comprises, in the amino-terminus to carboxyl-terminus direction, an INTS9 polypeptide or a portion thereof fused to an ALK polypeptide or a portion thereof. In some embodiments, the ALK-ITGA6 fusion polypeptide of the disclosure comprises, in the amino-terminus to carboxyl-terminus direction, an ALK polypeptide or a portion thereof fused to an ITGA6 polypeptide or a portion thereof. In some embodiments, the ALK-KCTD18 fusion polypeptide of the disclosure comprises, in the amino-terminus to carboxyl-terminus direction, an ALK polypeptide or a portion thereof fused to a KCTD18 polypeptide or a portion thereof. In some embodiments, the ALK-KIF5C fusion polypeptide of the disclosure comprises, in the amino-terminus to carboxyl-terminus direction, a KIF5C polypeptide or a portion thereof fused to an ALK polypeptide or a portion thereof. In some embodiments, the ALK-KLC4 fusion polypeptide of the disclosure comprises, in the amino-terminus to carboxyl-terminus direction, a KLC4 polypeptide or a portion thereof fused to an ALK polypeptide or a portion thereof. In some embodiments, the ALK-LINC00535 fusion polypeptide of the disclosure comprises an ALK polypeptide or a portion thereof. In some embodiments, the ALK-LRRFIP2 fusion polypeptide of the disclosure comprises, in the amino-terminus to carboxyl-terminus direction, an LRRFIP2 polypeptide or a portion thereof fused to an ALK polypeptide or a portion thereof. In some embodiments, the ALK-MAGOHB fusion polypeptide of the disclosure comprises, in the amino-terminus to carboxyl-terminus direction, a MAGOHB polypeptide or a portion thereof fused to an ALK polypeptide or a portion thereof. In some embodiments, the ALK-MAMDC4 fusion polypeptide of the disclosure comprises, in the amino-terminus to carboxyl-terminus direction, an ALK polypeptide or a portion thereof fused to a MAMDC4 polypeptide or a portion thereof. In some embodiments, the ALK-MANBA fusion polypeptide of the disclosure comprises, in the amino-terminus to carboxyl-terminus direction, a MANBA polypeptide or a portion thereof fused to an ALK polypeptide or a portion thereof. In some embodiments, the ALK-MAP3K9 fusion polypeptide of the disclosure comprises, in the amino-terminus to carboxyl-terminus direction, an ALK polypeptide or a portion thereof fused to a MAP3K9 polypeptide or a portion thereof. In some embodiments, the ALK-MED13L fusion polypeptide of the disclosure comprises, in the amino-terminus to carboxyl-terminus direction, an ALK polypeptide or a portion thereof fused to an MED13L polypeptide or a portion thereof. In some embodiments, the ALK-METTL25 fusion polypeptide of the disclosure comprises, in the amino-terminus to carboxyl-terminus direction, a METTL25 polypeptide or a portion thereof fused to an ALK polypeptide or a portion thereof. In some embodiments, the ALK-MTBP fusion polypeptide of the disclosure comprises, in the amino-terminus to carboxyl-terminus direction, an ALK polypeptide or a portion thereof fused to an MTBP polypeptide or a portion thereof. In some embodiments, the ALK-MYH10 fusion polypeptide of the disclosure comprises, in the amino-terminus to carboxyl-terminus direction, an MYH10 polypeptide or a portion thereof fused to an ALK polypeptide or a portion thereof. In some embodiments, the ALK-MYO5C fusion polypeptide of the disclosure comprises, in the amino-terminus to carboxyl-terminus direction, a MYO5C polypeptide or a portion thereof fused to an ALK polypeptide or a portion thereof. In some embodiments, the ALK-NFIA fusion polypeptide of the disclosure comprises, in the amino-terminus to carboxyl-terminus direction, an NFIA polypeptide or a portion thereof fused to an ALK polypeptide or a portion thereof. In some embodiments, the ALK-NINJ2 fusion polypeptide of the disclosure comprises, in the amino-terminus to carboxyl-terminus direction, a NINJ2 polypeptide or a portion thereof fused to an ALK polypeptide or a portion thereof. In some embodiments, the ALK-OPRM1 fusion polypeptide of the disclosure comprises, in the amino-terminus to carboxyl-terminus direction, an OPRM1 polypeptide or a portion thereof fused to an ALK polypeptide or a portion thereof. In some embodiments, the ALK-OTX1 fusion polypeptide of the disclosure comprises, in the amino-terminus to carboxyl-terminus direction, an ALK polypeptide or a portion thereof fused to an OTX1 polypeptide or a portion thereof. In some embodiments, the ALK-PAQR4 fusion polypeptide of the disclosure comprises, in the amino-terminus to carboxyl-terminus direction, an ALK polypeptide or a portion thereof fused to a PAQR4 polypeptide or a portion thereof. In some embodiments, the ALK-PDCD10 fusion polypeptide of the disclosure comprises, in the amino-terminus to carboxyl-terminus direction, an ALK polypeptide or a portion thereof fused to a PDCD10 polypeptide or a portion thereof. In some embodiments, the ALK-PDE3A fusion polypeptide of the disclosure comprises, in the amino-terminus to carboxyl-terminus direction, a PDE3A polypeptide or a portion thereof fused to an ALK polypeptide or a portion thereof. In some embodiments, the ALK-PELI1 fusion polypeptide of the disclosure comprises, in the amino-terminus to carboxyl-terminus direction, a PELI1 polypeptide or a portion thereof fused to an ALK polypeptide or a portion thereof. In some embodiments, the ALK-PELI1 fusion polypeptide of the disclosure comprises, in the amino-terminus to carboxyl-terminus direction, an ALK polypeptide or a portion thereof. In some embodiments, the ALK-PLEC fusion polypeptide of the disclosure comprises, in the amino-terminus to carboxyl-terminus direction, a PLEC polypeptide or a portion thereof fused to an ALK polypeptide or a portion thereof. In some embodiments, the ALK-PTGER4 fusion polypeptide of the disclosure comprises, in the amino-terminus to carboxyl-terminus direction, an ALK polypeptide or a portion thereof fused to a PTGER4 polypeptide or a portion thereof. In some embodiments, the ALK-PTPRJ fusion polypeptide of the disclosure comprises, in the amino-terminus to carboxyl-terminus direction, an ALK polypeptide or a portion thereof fused to a PTPRJ polypeptide or a portion thereof. In some embodiments, the ALK-QKI fusion polypeptide of the disclosure comprises, in the amino-terminus to carboxyl-terminus direction, a QKI polypeptide or a portion thereof fused to an ALK polypeptide or a portion thereof. In some embodiments, the ALK-RPS6KA5 fusion polypeptide of the disclosure comprises, in the amino-terminus to carboxyl-terminus direction, an RPS6KA5 polypeptide or a portion thereof fused to an ALK polypeptide or a portion thereof. In some embodiments, the ALK-SASH1 fusion polypeptide of the disclosure comprises, in the amino-terminus to carboxyl-terminus direction, a SASH1 polypeptide or a portion thereof fused to an ALK polypeptide or a portion thereof. In some embodiments, the ALK-SEC16B fusion polypeptide of the disclosure comprises, in the amino-terminus to carboxyl-terminus direction, a SEC16B polypeptide or a portion thereof fused to an ALK polypeptide or a portion thereof. In some embodiments, the ALK-SKAP1 fusion polypeptide of the disclosure comprises, in the amino-terminus to carboxyl-terminus direction, a SKAP1 polypeptide or a portion thereof fused to an ALK polypeptide or a portion thereof. In some embodiments, the ALK-SLC25A13 fusion polypeptide of the disclosure comprises, in the amino-terminus to carboxyl-terminus direction, an SLC25A13 polypeptide or a portion thereof fused to an ALK polypeptide or a portion thereof. In some embodiments, the ALK-SLC30A6 fusion polypeptide of the disclosure comprises, in the amino-terminus to carboxyl-terminus direction, an ALK polypeptide or a portion thereof fused to an SLC30A6 polypeptide or a portion thereof. In some embodiments, the ALK-SNX17 fusion polypeptide of the disclosure comprises, in the amino-terminus to carboxyl-terminus direction, an ALK polypeptide or a portion thereof fused to an SNX17 polypeptide or a portion thereof. In some embodiments, the ALK-SOX13 fusion polypeptide of the disclosure comprises, in the amino-terminus to carboxyl-terminus direction, a SOX13 polypeptide or a portion thereof fused to an ALK polypeptide or a portion thereof. In some embodiments, the ALK-SRSF7 fusion polypeptide of the disclosure comprises, in the amino-terminus to carboxyl-terminus direction, an SRSF7 polypeptide or a portion thereof fused to an ALK polypeptide or a portion thereof. In some embodiments, the ALK-TANGO6 fusion polypeptide of the disclosure comprises, in the amino-terminus to carboxyl-terminus direction, a TANGO6 polypeptide or a portion thereof fused to an ALK polypeptide or a portion thereof. In some embodiments, the ALK-TG fusion polypeptide of the disclosure comprises, in the amino-terminus to carboxyl-terminus direction, a TG polypeptide or a portion thereof fused to an ALK polypeptide or a portion thereof. In some embodiments, the ALK-TMCO3 fusion polypeptide of the disclosure comprises, in the amino-terminus to carboxyl-terminus direction, a TMCO3 polypeptide or a portion thereof fused to an ALK polypeptide or a portion thereof. In some embodiments, the ALK-TNS3 fusion polypeptide of the disclosure comprises, in the amino-terminus to carboxyl-terminus direction, a TNS3 polypeptide or a portion thereof fused to an ALK polypeptide or a portion thereof. In some embodiments, the ALK-TRIM24 fusion polypeptide of the disclosure comprises, in the amino-terminus to carboxyl-terminus direction, a TRIM24 polypeptide or a portion thereof fused to an ALK polypeptide or a portion thereof. In some embodiments, the ALK-TTC28 fusion polypeptide of the disclosure comprises, in the amino-terminus to carboxyl-terminus direction, a TTC28 polypeptide or a portion thereof fused to an ALK polypeptide or a portion thereof. In some embodiments, the ALK-UBE2L3 fusion polypeptide of the disclosure comprises, in the amino-terminus to carboxyl-terminus direction, a UBE2L3 polypeptide or a portion thereof fused to an ALK polypeptide or a portion thereof. In some embodiments, the ALK-UBE3B fusion polypeptide of the disclosure comprises, in the amino-terminus to carboxyl-terminus direction, a UBE3B polypeptide or a portion thereof fused to an ALK polypeptide or a portion thereof. In some embodiments, the ALK-UTRN fusion polypeptide of the disclosure comprises, in the amino-terminus to carboxyl-terminus direction, a UTRN polypeptide or a portion thereof fused to an ALK polypeptide or a portion thereof. In some embodiments, the ALK-VASP fusion polypeptide of the disclosure comprises, in the amino-terminus to carboxyl-terminus direction, a VASP polypeptide or a portion thereof fused to an ALK polypeptide or a portion thereof. In some embodiments, the ALK-WDR92 fusion polypeptide of the disclosure comprises, in the amino-terminus to carboxyl-terminus direction, a WDR92 polypeptide or a portion thereof fused to an ALK polypeptide or a portion thereof. In some embodiments, the ALK-YPEL5 fusion polypeptide of the disclosure comprises, in the amino-terminus to carboxyl-terminus direction, an YPEL5 polypeptide or a portion thereof fused to an ALK polypeptide or a portion thereof. In some embodiments, the ALK-ZNF446 fusion polypeptide of the disclosure comprises, in the amino-terminus to carboxyl-terminus direction, a ZNF446 polypeptide or a portion thereof fused to an ALK polypeptide or a portion thereof. In some embodiments, the ALK-ZNF454 fusion polypeptide of the disclosure comprises, in the amino-terminus to carboxyl-terminus direction, an ALK polypeptide or a portion thereof fused to a ZNF454 polypeptide or a portion thereof. In some embodiments, the ALK-ZNF513 fusion polypeptide of the disclosure comprises, in the amino-terminus to carboxyl-terminus direction, a ZNF513 polypeptide or a portion thereof fused to an ALK polypeptide or a portion thereof. In some embodiments, the ALK-ZSWIM2 fusion polypeptide of the disclosure comprises, in the amino-terminus to carboxyl-terminus direction, an ALK polypeptide or a portion thereof fused to a ZSWIM2 polypeptide or a portion thereof. In some embodiments, the ALK-FILIP1L fusion polypeptide of the disclosure comprises, in the amino-terminus to carboxyl-terminus direction, an ALK polypeptide or a portion thereof fused to an FILIP1L polypeptide or a portion thereof.

[0242] In some embodiments, the ALK-COL3A1 fusion polypeptide of the disclosure comprises a fusion of exon 48 of COL3A1, or a portion thereof, fused to exon 19 of ALK, or a portion thereof, e.g., in the amino-terminus to carboxyl-terminus direction. In some embodiments, the ALK-CDC42BPA fusion polypeptide of the disclosure comprises a fusion of exon 20 of CDC42BPA, or a portion thereof, fused to exon 20 of ALK, or a portion thereof, e.g., in the amino-terminus to carboxyl-terminus direction. In some embodiments, the ALK-EPHA2 fusion polypeptide of the disclosure comprises a fusion of exon 3 of EPHA2, or a portion thereof, fused to exon 19 of ALK, or a portion thereof, e.g., in the amino-terminus to carboxyl-terminus direction. In some embodiments, the ALK-MYO5C fusion polypeptide of the disclosure comprises a fusion of exon 30 of MYO5C, or a portion thereof, fused to exon 20 of ALK, or a portion thereof, e.g., in the amino-terminus to carboxyl-terminus direction. In some embodiments, the ALK-TRIM24 fusion polypeptide of the disclosure comprises a fusion of exon 12 of TRIM24, or a portion thereof, fused to exon 20 of ALK, or a portion thereof, e.g., in the amino-terminus to carboxyl-terminus direction. In some embodiments, the ALK-SKAP1 fusion polypeptide of the disclosure comprises a fusion of exon 3 of SKAP1, or a portion thereof, fused to exon 20 of ALK, or a portion thereof, e.g., in the amino-terminus to carboxyl-terminus direction. In some embodiments, the ALK-UBE3B fusion polypeptide of the disclosure comprises a fusion of exon 11 of UBE3B, or a portion thereof, fused to exon 20 of ALK, or a portion thereof, e.g., in the amino-terminus to carboxyl-terminus direction. In some embodiments, the ALK-TNS3 fusion polypeptide of the disclosure comprises a fusion of exon 25 of TNS3, or a portion thereof, fused to exon 20 of ALK, or a portion thereof, e.g., in the amino-terminus to carboxyl-terminus direction. In some embodiments, the ALK-C2orf73 fusion polypeptide of the disclosure comprises a fusion of exon 3 of C2orf73, or a portion thereof, fused to exon 20 of ALK, or a portion thereof, e.g., in the amino-terminus to carboxyl-terminus direction. In some embodiments, the ALK-AZI2 fusion polypeptide of the disclosure comprises a fusion of exon 7 of AZI2, or a portion thereof, fused to exon 20 of ALK, or a portion thereof, e.g., in the amino-terminus to carboxyl-terminus direction. In some embodiments, the ALK-MANBA fusion polypeptide of the disclosure comprises a fusion of exon 14 of MANBA, or a portion thereof, fused to exon 20 of ALK, or a portion thereof, e.g., in the amino-terminus to carboxyl-terminus direction. In some embodiments, the ALK-CNTNAP5 fusion polypeptide of the disclosure comprises a fusion of exon 2 of CNTNAP5, or a portion thereof, fused to exon 20 of ALK, or a portion thereof, e.g., in the amino-terminus to carboxyl-terminus direction. In some embodiments, the ALK-TANGO6 fusion polypeptide of the disclosure comprises a fusion of exon 1 of TANGO6, or a portion thereof, fused to exon 2 of ALK, or a portion thereof, e.g., in the amino-terminus to carboxyl-terminus direction. In some embodiments, the ALK-NFIA fusion polypeptide of the disclosure comprises a fusion of exon 2 of NFIA, or a portion thereof, fused to exon 2 of ALK, or a portion thereof, e.g., in the amino-terminus to carboxyl-terminus direction. In some embodiments, the ALK-RPS6KA5 fusion polypeptide of the disclosure comprises a fusion of exon 1 of RPS6KA5, or a portion thereof, fused to exon 8 of ALK, or a portion thereof, e.g., in the amino-terminus to carboxyl-terminus direction. In some embodiments, the ALK-TG fusion polypeptide of the disclosure comprises a fusion of exon 10 of TG, or a portion thereof, fused to exon 19 of ALK, or a portion thereof, e.g., in the amino-terminus to carboxyl-terminus direction. In some embodiments, the ALK-LRRFIP2 fusion polypeptide of the disclosure comprises a fusion of exon 25 of LRRFIP2, or a portion thereof, fused to exon 20 of ALK, or a portion thereof, e.g., in the amino-terminus to carboxyl-terminus direction. In some embodiments, the ALK-MYO5C fusion polypeptide of the disclosure comprises a fusion of exon 30 of MYO5C, or a portion thereof, fused to exon 20 of ALK, or a portion thereof, e.g., in the amino-terminus to carboxyl-terminus direction. In some embodiments, the ALK-AGAP1 fusion polypeptide of the disclosure comprises a fusion of exon 6 of AGAP1, or a portion thereof, fused to exon 18 of ALK, or a portion thereof, e.g., in the amino-terminus to carboxyl-terminus direction. In some embodiments, the ALK-MED13L fusion polypeptide of the disclosure comprises a fusion of exon 1 of ALK, or a portion thereof, fused to exon 6 of MED13L, or a portion thereof, e.g., in the amino-terminus to carboxyl-terminus direction. In some embodiments, the ALK-MTBP fusion polypeptide of the disclosure comprises a fusion of exon 17 of ALK, or a portion thereof, fused to exon 12 of MTBP, or a portion thereof, e.g., in the amino-terminus to carboxyl-terminus direction. In some embodiments, the ALK-SLC30A6 fusion polypeptide of the disclosure comprises a fusion of exon 18 of ALK, or a portion thereof, fused to exon 4 of SLC30A6, or a portion thereof, e.g., in the amino-terminus to carboxyl-terminus direction. In some embodiments, the ALK-GMCL1 fusion polypeptide of the disclosure comprises a fusion of exon 27 of ALK, or a portion thereof, fused to exon 7 of GMCL1, or a portion thereof, e.g., in the amino-terminus to carboxyl-terminus direction. In some embodiments, the ALK-AGAP1 fusion polypeptide of the disclosure comprises a fusion of exon 19 of ALK, or a portion thereof, fused to exon 7 of AGAP1, or a portion thereof, e.g., in the amino-terminus to carboxyl-terminus direction. In some embodiments, the ALK-ZNF454 fusion polypeptide of the disclosure comprises a fusion of exon 19 of ALK, or a portion thereof, fused to exon 5 of ZNF454, or a portion thereof, e.g., in the amino-terminus to carboxyl-terminus direction. In some embodiments, the ALK-TTC28 fusion polypeptide of the disclosure comprises a fusion of exon 1 of TTC28, or a portion thereof, fused to exon 14 of ALK, or a portion thereof, e.g., in the amino-terminus to carboxyl-terminus direction. In some embodiments, the ALK-NINJ2 fusion polypeptide of the disclosure comprises a fusion of exon 1 of NINJ2, or a portion thereof, fused to exon 14 of ALK, or a portion thereof, e.g., in the amino-terminus to carboxyl-terminus direction. In some embodiments, the ALK-UTRN fusion polypeptide of the disclosure comprises a fusion of exon 72 of UTRN, or a portion thereof, fused to exon 19 of ALK, or a portion thereof, e.g., in the amino-terminus to carboxyl-terminus direction. In some embodiments, the ALK-ACTN4 fusion polypeptide of the disclosure comprises a fusion of exon 7 of ACTN4, or a portion thereof, fused to exon 20 of ALK, or a portion thereof, e.g., in the amino-terminus to carboxyl-terminus direction. In some embodiments, the ALK-CPSF7 fusion polypeptide of the disclosure comprises a fusion of exon 5 of CPSF7, or a portion thereof, fused to exon 20 of ALK, or a portion thereof, e.g., in the amino-terminus to carboxyl-terminus direction. In some embodiments, the ALK-SLC25A13 fusion polypeptide of the disclosure comprises a fusion of exon 10 of SLC25A13, or a portion thereof, fused to exon 20 of ALK, or a portion thereof, e.g., in the amino-terminus to carboxyl-terminus direction. In some embodiments, the ALK-CTNND1 fusion polypeptide of the disclosure comprises a fusion of exon 16 of CTNND1, or a portion thereof, fused to exon 20 of ALK, or a portion thereof, e.g., in the amino-terminus to carboxyl-terminus direction. In some embodiments, the ALK-KLC4 fusion polypeptide of the disclosure comprises a fusion of exon 9 of KLC4, or a portion thereof, fused to exon 20 of ALK, or a portion thereof, e.g., in the amino-terminus to carboxyl-terminus direction. In some embodiments, the ALK-BTBD9 fusion polypeptide of the disclosure comprises a fusion of exon 5 of BTBD9, or a portion thereof, fused to exon 20 of ALK, or a portion thereof, e.g., in the amino-terminus to carboxyl-terminus direction. In some embodiments, the ALK-CPQ fusion polypeptide of the disclosure comprises a fusion of exon 7 of CPQ, or a portion thereof, fused to exon 20 of ALK, or a portion thereof, e.g., in the amino-terminus to carboxyl-terminus direction. In some embodiments, the ALK-KIF5C fusion polypeptide of the disclosure comprises a fusion of exon 11 of KIF5C, or a portion thereof, fused to exon 20 of ALK, or a portion thereof, e.g., in the amino-terminus to carboxyl-terminus direction. In some embodiments, the ALK-MAGOHB fusion polypeptide of the disclosure comprises a fusion of exon 1 of MAGOHB, or a portion thereof, fused to exon 20 of ALK, or a portion thereof, e.g., in the amino-terminus to carboxyl-terminus direction. In some embodiments, the ALK-COL3A1 fusion polypeptide of the disclosure comprises a fusion of exon 48 of COL3A1, or a portion thereof, fused to exon 19 of ALK, or a portion thereof, e.g., in the amino-terminus to carboxyl-terminus direction. In some embodiments, the ALK-OPRM1 fusion polypeptide of the disclosure comprises a fusion of exon 3 of OPRM1, or a portion thereof, fused to exon 20 of ALK, or a portion thereof, e.g., in the amino-terminus to carboxyl-terminus direction. In some embodiments, the ALK-GPN1 fusion polypeptide of the disclosure comprises a fusion of exon 1 of GPN1, or a portion thereof, fused to exon 16 of ALK, or a portion thereof, e.g., in the amino-terminus to carboxyl-terminus direction. In some embodiments, the ALK-SEC16B fusion polypeptide of the disclosure comprises a fusion of exon 13 of SEC16B, or a portion thereof, fused to exon 14 of ALK, or a portion thereof, e.g., in the amino-terminus to carboxyl-terminus direction. In some embodiments, the ALK-UBE2L3 fusion polypeptide of the disclosure comprises a fusion of exon 1 of UBE2L3, or a portion thereof, fused to exon 18 of ALK, or a portion thereof, e.g., in the amino-terminus to carboxyl-terminus direction. In some embodiments, the ALK-METTL25 fusion polypeptide of the disclosure comprises a fusion of exon 8 of METTL25, or a portion thereof, fused to exon 20 of ALK, or a portion thereof, e.g., in the amino-terminus to carboxyl-terminus direction. In some embodiments, the ALK-CYS1 fusion polypeptide of the disclosure comprises a fusion of exon 1 of CYS1, or a portion thereof, fused to exon 20 of ALK, or a portion thereof, e.g., in the amino-terminus to carboxyl-terminus direction. In some embodiments, the ALK-ABCB11 fusion polypeptide of the disclosure comprises a fusion of exon 26 of ABCB11, or a portion thereof, fused to exon 20 of ALK, or a portion thereof, e.g., in the amino-terminus to carboxyl-terminus direction. In some embodiments, the ALK-INTS9 fusion polypeptide of the disclosure comprises a fusion of exon 8 of INTS9, or a portion thereof, fused to exon 20 of ALK, or a portion thereof, e.g., in the amino-terminus to carboxyl-terminus direction. In some embodiments, the ALK-CIB4 fusion polypeptide of the disclosure comprises a fusion of exon 3 of CIB4, or a portion thereof, fused to exon 20 of ALK, or a portion thereof, e.g., in the amino-terminus to carboxyl-terminus direction. In some embodiments, the ALK-WDR92 fusion polypeptide of the disclosure comprises a fusion of exon 7 of WDR92, or a portion thereof, fused to exon 2 of ALK, or a portion thereof, e.g., in the amino-terminus to carboxyl-terminus direction. In some embodiments, the ALK-OTX1 fusion polypeptide of the disclosure comprises a fusion of exon 19 of ALK, or a portion thereof, fused to exon 5 of OTX1, or a portion thereof, e.g., in the amino-terminus to carboxyl-terminus direction. In some embodiments, the ALK-PDCD10 fusion polypeptide of the disclosure comprises a fusion of exon 15 of ALK, or a portion thereof, fused to exon 3 of PDCD10, or a portion thereof, e.g., in the amino-terminus to carboxyl-terminus direction. In some embodiments, the ALK-PTGER4 fusion polypeptide of the disclosure comprises a fusion of exon 19 of ALK, or a portion thereof, fused to exon 3 of PTGER4, or a portion thereof, e.g., in the amino-terminus to carboxyl-terminus direction. In some embodiments, the ALK-PTPRJ fusion polypeptide of the disclosure comprises a fusion of exon 19 of ALK, or a portion thereof, fused to exon 2 of PTPRJ, or a portion thereof, e.g., in the amino-terminus to carboxyl-terminus direction. In some embodiments, the ALK-ZSWIM2 fusion polypeptide of the disclosure comprises a fusion of exon 19 of ALK, or a portion thereof, fused to exon 6 of ZSWIM2, or a portion thereof, e.g., in the amino-terminus to carboxyl-terminus direction. In some embodiments, the ALK-FHOD3 fusion polypeptide of the disclosure comprises a fusion of exon 18 of ALK, or a portion thereof, fused to exon 10 of FHOD3, or a portion thereof, e.g., in the amino-terminus to carboxyl-terminus direction. In some embodiments, the ALK-FILIP1L fusion polypeptide of the disclosure comprises a fusion of exon 18 of ALK, or a portion thereof, fused to exon 2 of FILP1L, or a portion thereof, e.g., in the amino-terminus to carboxyl-terminus direction. In some embodiments, the ALK-ITGA6 fusion polypeptide of the disclosure comprises a fusion of exon 19 of ALK, or a portion thereof, fused to exon 2 of ITGA6, or a portion thereof, e.g., in the amino-terminus to carboxyl-terminus direction. In some embodiments, the ALK-KCTD18 fusion polypeptide of the disclosure comprises a fusion of exon 19 of ALK, or a portion thereof, fused to exon 2 of KCTD18, or a portion thereof, e.g., in the amino-terminus to carboxyl-terminus direction. In some embodiments, the ALK-MAMDC4 fusion polypeptide of the disclosure comprises a fusion of exon 20 of ALK, or a portion thereof, fused to exon 16 of MAMDC4, or a portion thereof, e.g., in the amino-terminus to carboxyl-terminus direction. In some embodiments, the ALK-PELI1 fusion polypeptide of the disclosure comprises exon 20 of ALK, or a portion thereof, e.g., in the amino-terminus to carboxyl-terminus direction. In some embodiments, the ALK-LINC00535 fusion polypeptide of the disclosure comprises exon 20 of ALK, or a portion thereof, e.g., in the amino-terminus to carboxyl-terminus direction. In some embodiments, the ALK-CTBP1 fusion polypeptide of the disclosure comprises a fusion of exon 9 of CTBP1, or a portion thereof, fused to exon 20 of ALK, or a portion thereof, e.g., in the amino-terminus to carboxyl-terminus direction. In some embodiments, the ALK-CARMIL1 fusion polypeptide of the disclosure comprises a fusion of exon 27 of CARMIL1, or a portion thereof, fused to exon 20 of ALK, or a portion thereof, e.g., in the amino-terminus to carboxyl-terminus direction. In some embodiments, the ALK-ZNF513 fusion polypeptide of the disclosure comprises a fusion of exon 1 of ZNF513, or a portion thereof, fused to exon 1 of ALK, or a portion thereof, e.g., in the amino-terminus to carboxyl-terminus direction. In some embodiments, the ALK-TMCO3 fusion polypeptide of the disclosure comprises a fusion of exon 6 of TMCO3, or a portion thereof, fused to exon 11 of ALK, or a portion thereof, e.g., in the amino-terminus to carboxyl-terminus direction. In some embodiments, the ALK-SRSF7 fusion polypeptide of the disclosure comprises a fusion of exon 4 of SRSF7, or a portion thereof, fused to exon 18 of ALK, or a portion thereof, e.g., in the amino-terminus to carboxyl-terminus direction. In some embodiments, the ALK-CASP8 fusion polypeptide of the disclosure comprises a fusion of exon 10 of CASP8, or a portion thereof, fused to exon 2 of ALK, or a portion thereof, e.g., in the amino-terminus to carboxyl-terminus direction. In some embodiments, the ALK-CYP51A1 fusion polypeptide of the disclosure comprises a fusion of exon 9 of CYP51A1, or a portion thereof, fused to exon 3 of ALK, or a portion thereof, e.g., in the amino-terminus to carboxyl-terminus direction. In some embodiments, the ALK-GPR113 fusion polypeptide of the disclosure comprises a fusion of exon 1 of GPR113, or a portion thereof, fused to exon 19 of ALK, or a portion thereof, e.g., in the amino-terminus to carboxyl-terminus direction. In some embodiments, the ALK-HADHA fusion polypeptide of the disclosure comprises a fusion of exon 5 of HADHA, or a portion thereof, fused to exon 5 of ALK, or a portion thereof, e.g., in the amino-terminus to carboxyl-terminus direction. In some embodiments, the ALK-LRRFIP2 fusion polypeptide of the disclosure comprises a fusion of exon 22 of LRRFIP2, or a portion thereof, fused to exon 20 of ALK, or a portion thereof, e.g., in the amino-terminus to carboxyl-terminus direction. In some embodiments, the ALK-MYH10 fusion polypeptide of the disclosure comprises a fusion of exon 38 of MYH10, or a portion thereof, fused to exon 20 of ALK, or a portion thereof, e.g., in the amino-terminus to carboxyl-terminus direction. In some embodiments, the ALK-PDE3A fusion polypeptide of the disclosure comprises a fusion of exon 10 of PDE3A, or a portion thereof, fused to exon 8 of ALK, or a portion thereof, e.g., in the amino-terminus to carboxyl-terminus direction. In some embodiments, the ALK-PLEC fusion polypeptide of the disclosure comprises a fusion of exon 9 of PLEC, or a portion thereof, fused to exon 20 of ALK, or a portion thereof, e.g., in the amino-terminus to carboxyl-terminus direction. In some embodiments, the ALK-QKI fusion polypeptide of the disclosure comprises a fusion of exon 2 of QKI, or a portion thereof, fused to exon 20 of ALK, or a portion thereof, e.g., in the amino-terminus to carboxyl-terminus direction. In some embodiments, the ALK-SASH1 fusion polypeptide of the disclosure comprises a fusion of exon 14 of SASH1, or a portion thereof, fused to exon 18 of ALK, or a portion thereof, e.g., in the amino-terminus to carboxyl-terminus direction. In some embodiments, the ALK-SRSF7 fusion polypeptide of the disclosure comprises a fusion of exon 5 of SRSF7, or a portion thereof, fused to exon 18 of ALK, or a portion thereof, e.g., in the amino-terminus to carboxyl-terminus direction. In some embodiments, the ALK-VASP fusion polypeptide of the disclosure comprises a fusion of exon 4 of VASP, or a portion thereof, fused to exon 7 of ALK, or a portion thereof, e.g., in the amino-terminus to carboxyl-terminus direction. In some embodiments, the ALK-ZNF446 fusion polypeptide of the disclosure comprises a fusion of exon 7 of ZNF446, or a portion thereof, fused to exon 20 of ALK, or a portion thereof, e.g., in the amino-terminus to carboxyl-terminus direction. In some embodiments, the ALK-SOX13 fusion polypeptide of the disclosure comprises exon 18 of ALK, or a portion thereof, e.g., in the amino-terminus to carboxyl-terminus direction. In some embodiments, the ALK-YPEL5 fusion polypeptide of the disclosure comprises exon 18 of ALK, or a portion thereof, e.g., in the amino-terminus to carboxyl-terminus direction. In some embodiments, the ALK-CAPN14 fusion polypeptide of the disclosure comprises a fusion of exon 14 of ALK, or a portion thereof, fused to exon 3 of CAPN14, or a portion thereof, e.g., in the amino-terminus to carboxyl-terminus direction. In some embodiments, the ALK-MAP3K9 fusion polypeptide of the disclosure comprises a fusion of exon 1 of ALK, or a portion thereof, fused to exon 4 of MAP3K9, or a portion thereof, e.g., in the amino-terminus to carboxyl-terminus direction. In some embodiments, the ALK-SNX17 fusion polypeptide of the disclosure comprises a fusion of exon 13 of ALK, or a portion thereof, fused to exon 3 of SNX17, or a portion thereof, e.g., in the amino-terminus to carboxyl-terminus direction. In some embodiments, the ALK-HS1BP3 fusion polypeptide of the disclosure comprises a fusion of exon 19 of ALK, or a portion thereof, fused to exon 4 of HS1BP3, or a portion thereof, e.g., in the amino-terminus to carboxyl-terminus direction. In some embodiments, the ALK-CREBBP fusion polypeptide of the disclosure comprises a fusion of exon 3 of ALK, or a portion thereof, fused to exon 2 of CREBBP, or a portion thereof, e.g., in the amino-terminus to carboxyl-terminus direction. In some embodiments, the ALK-PAQR4 fusion polypeptide of the disclosure comprises a fusion of exon 3 of ALK, or a portion thereof, fused to exon 1 of PAQR4, or a portion thereof, e.g., in the amino-terminus to carboxyl-terminus direction. In some embodiments, the ALK-APH1A fusion polypeptide of the disclosure comprises a fusion of exon 4 of ALK, or a portion thereof, fused to exon 4 of APH1A, or a portion thereof, e.g., in the amino-terminus to carboxyl-terminus direction.

[0243] In some embodiments, the ALK-COL3A1 fusion polypeptide of the disclosure comprises exons 1-47, and exon 48 or a portion thereof, of COL3A1 fused to exon 19 or a portion thereof, and exons 20-29, of ALK, e.g., in the amino-terminus to carboxyl-terminus direction. In some embodiments, the ALK-CDC42BPA fusion polypeptide of the disclosure comprises exons 1-19, and exon 20 or a portion thereof, of CDC42BPA fused to exon 20 or a portion thereof, and exons 21-29, of ALK, e.g., in the amino-terminus to carboxyl-terminus direction. In some embodiments, the ALK-EPHA2 fusion polypeptide of the disclosure comprises exons 1-2, and exon 3 or a portion thereof, of EPHA2 fused to exon 19 or a portion thereof, and exons 20-29, of ALK, e.g., in the amino-terminus to carboxyl-terminus direction. In some embodiments, the ALK-MYO5C fusion polypeptide of the disclosure comprises exons 1-29, and exon 30 or a portion thereof, of MYO5C fused to exon 20 or a portion thereof, and exons 21-29, of ALK, e.g., in the amino-terminus to carboxyl-terminus direction. In some embodiments, the ALK-TRIM24 fusion polypeptide of the disclosure comprises exons 1-11, and exon 12 or a portion thereof, of TRIM24 fused to exon 20 or a portion thereof, and exons 21-29, of ALK, e.g., in the amino-terminus to carboxyl-terminus direction. In some embodiments, the ALK-SKAP1 fusion polypeptide of the disclosure comprises exons 1-2, and exon 3 or a portion thereof, of SKAP1 fused to exon 20 or a portion thereof, and exons 21-29, of ALK, e.g., in the amino-terminus to carboxyl-terminus direction. In some embodiments, the ALK-UBE3B fusion polypeptide of the disclosure comprises exons 1-10, and exon 11 or a portion thereof, of UBE3B fused to exon 20 or a portion thereof, and exons 21-29, of ALK, e.g., in the amino-terminus to carboxyl-terminus direction. In some embodiments, the ALK-TNS3 fusion polypeptide of the disclosure comprises exons 1-24, and exon 25 or a portion thereof, of TNS3 fused to exon 20 or a portion thereof, and exons 21-29, of ALK, e.g., in the amino-terminus to carboxyl-terminus direction. In some embodiments, the ALK-C2orf73 fusion polypeptide of the disclosure comprises exons 1-2, and exon 3 or a portion thereof, of C2orf73 fused to exon 20 or a portion thereof, and exons 21-29, of ALK, e.g., in the amino-terminus to carboxyl-terminus direction. In some embodiments, the ALK-AZI2 fusion polypeptide of the disclosure comprises exons 1-6, and exon 7 or a portion thereof, of AZI2 fused to exon 20 or a portion thereof, and exons 21-29, of ALK, e.g., in the amino-terminus to carboxyl-terminus direction. In some embodiments, the ALK-MANBA fusion polypeptide of the disclosure comprises exons 1-13, and exon 14 or a portion thereof, of MANBA fused to exon 20 or a portion thereof, and exons 21-29, of ALK, e.g., in the amino-terminus to carboxyl-terminus direction. In some embodiments, the ALK-CNTNAP5 fusion polypeptide of the disclosure comprises exon 1, and exon 2 or a portion thereof, of CNTNAP5 fused to exon 20 or a portion thereof, and exons 21-29, of ALK, e.g., in the amino-terminus to carboxyl-terminus direction. In some embodiments, the ALK-TANGO6 fusion polypeptide of the disclosure comprises exon 1 or a portion thereof of TANGO6 fused to exon 2 or a portion thereof, and exons 3-29, of ALK, e.g., in the amino-terminus to carboxyl-terminus direction. In some embodiments, the ALK-NFIA fusion polypeptide of the disclosure comprises exon 1, and exon 2 or a portion thereof, of NFIA fused to exon 2 or a portion thereof, and exons 3-29, of ALK, e.g., in the amino-terminus to carboxyl-terminus direction. In some embodiments, the ALK-RPS6KA5 fusion polypeptide of the disclosure comprises exon 1 or a portion thereof of RPS6KA5 fused to exon 8 or a portion thereof, and exons 9-29, of ALK, e.g., in the amino-terminus to carboxyl-terminus direction. In some embodiments, the ALK-TG fusion polypeptide of the disclosure comprises exons 1-9, and exon 10 or a portion thereof, of TG fused to exon 19 or a portion thereof, and exons 20-29, of ALK, e.g., in the amino-terminus to carboxyl-terminus direction. In some embodiments, the ALK-LRRFIP2 fusion polypeptide of the disclosure comprises exons 1-24, and exon 25 or a portion thereof, of LRRFIP2 fused to exon 20 or a portion thereof, and exons 21-29, of ALK, e.g., in the amino-terminus to carboxyl-terminus direction. In some embodiments, the ALK-MYO5C fusion polypeptide of the disclosure comprises exons 1-29, and exon 30 or a portion thereof, of MYO5C fused to exon 20 or a portion thereof, and exons 21-29, of ALK, e.g., in the amino-terminus to carboxyl-terminus direction. In some embodiments, the ALK-AGAP1 fusion polypeptide of the disclosure comprises exons 1-5, and exon 6 or a portion thereof, of AGAP1 fused to exon 18 or a portion thereof, and exons 19-29, of ALK, e.g., in the amino-terminus to carboxyl-terminus direction. In some embodiments, the ALK-MED13L fusion polypeptide of the disclosure comprises exon 1 or a portion thereof of ALK fused to exon 6 or a portion thereof, and exons 7-31, of MED13L, e.g., in the amino-terminus to carboxyl-terminus direction. In some embodiments, the ALK-MTBP fusion polypeptide of the disclosure comprises exons 1-16, and exon 17 or a portion thereof, of ALK fused to exon 12 or a portion thereof, and exons 13-22, of MTBP, e.g., in the amino-terminus to carboxyl-terminus direction. In some embodiments, the ALK-SLC30A6 fusion polypeptide of the disclosure comprises exons 1-17, and exon 18 or a portion thereof, of ALK fused to exon 4 or a portion thereof, and exons 5-14, of SLC30A6, e.g., in the amino-terminus to carboxyl-terminus direction. In some embodiments, the ALK-GMCL1 fusion polypeptide of the disclosure comprises exons 1-26, and exon 27 or a portion thereof, of ALK fused to exon 7 or a portion thereof, and exons 8-14, of GMCL1, e.g., in the amino-terminus to carboxyl-terminus direction. In some embodiments, the ALK-AGAP1 fusion polypeptide of the disclosure comprises exons 1-18, and exon 19 or a portion thereof, of ALK fused to exon 7 or a portion thereof, and exons 8-17, of AGAP1, e.g., in the amino-terminus to carboxyl-terminus direction. In some embodiments, the ALK-ZNF454 fusion polypeptide of the disclosure comprises exons 1-18, and exon 19 or a portion thereof, of ALK fused to exon 5 or a portion thereof of ZNF454, e.g., in the amino-terminus to carboxyl-terminus direction. In some embodiments, the ALK-TTC28 fusion polypeptide of the disclosure comprises exon 1 or a portion thereof of TTC28 fused to exon 14 or a portion thereof, and exons 15-29, of ALK, e.g., in the amino-terminus to carboxyl-terminus direction. In some embodiments, the ALK-NINJ2 fusion polypeptide of the disclosure comprises exon 1 or a portion thereof of NINJ2 fused to exon 14 or a portion thereof, and exons 15-29, of ALK, e.g., in the amino-terminus to carboxyl-terminus direction. In some embodiments, the ALK-UTRN fusion polypeptide of the disclosure comprises exons 1-71, and exon 72 or a portion thereof, of UTRN fused to exon 19 or a portion thereof, and exons 20-29, of ALK, e.g., in the amino-terminus to carboxyl-terminus direction. In some embodiments, the ALK-ACTN4 fusion polypeptide of the disclosure comprises exons 1-6, and exon 7 or a portion thereof, of ACTN4 fused to exon 20 or a portion thereof, and exons 21-29, of ALK, e.g., in the amino-terminus to carboxyl-terminus direction. In some embodiments, the ALK-CPSF7 fusion polypeptide of the disclosure comprises exons 1-4, and exon 5 or a portion thereof, of CPSF7 fused to exon 20 or a portion thereof, and exons 21-29, of ALK, e.g., in the amino-terminus to carboxyl-terminus direction. In some embodiments, the ALK-SLC25A13 fusion polypeptide of the disclosure comprises exons 1-9, and exon 10 or a portion thereof, of SLC25A13 fused to exon 20 or a portion thereof, and exons 21-29, of ALK, e.g., in the amino-terminus to carboxyl-terminus direction. In some embodiments, the ALK-CTNND1 fusion polypeptide of the disclosure comprises exons 1-15, and exon 16 or a portion thereof, of CTNND1 fused to exon 20 or a portion thereof, and exons 21-29, of ALK, e.g., in the amino-terminus to carboxyl-terminus direction. In some embodiments, the ALK-KLC4 fusion polypeptide of the disclosure comprises exons 1-8, and exon 9 or a portion thereof, of KLC4 fused to exon 20 or a portion thereof, and exons 21-29, of ALK, e.g., in the amino-terminus to carboxyl-terminus direction. In some embodiments, the ALK-BTBD9 fusion polypeptide of the disclosure comprises exons 1-4, and exon 5 or a portion thereof, of BTBD9 fused to exon 20 or a portion thereof, and exons 21-29, of ALK, e.g., in the amino-terminus to carboxyl-terminus direction. In some embodiments, the ALK-CPQ fusion polypeptide of the disclosure comprises exons 1-6, and exon 7 or a portion thereof, of CPQ fused to exon 20 or a portion thereof, and exons 21-29, of ALK, e.g., in the amino-terminus to carboxyl-terminus direction. In some embodiments, the ALK-KIF5C fusion polypeptide of the disclosure comprises exons 1-10, and exon 11 or a portion thereof, of KIF5C fused to exon 20 or a portion thereof, and exons 21-29, of ALK, e.g., in the amino-terminus to carboxyl-terminus direction. In some embodiments, the ALK-MAGOHB fusion polypeptide of the disclosure comprises exon 1 or a portion thereof of MAGOHB fused to exon 20 or a portion thereof, and exons 21-29, of ALK, e.g., in the amino-terminus to carboxyl-terminus direction. In some embodiments, the ALK-COL3A1 fusion polypeptide of the disclosure comprises exons 1-47, and exon 48 or a portion thereof, of COL3A1 fused to exon 19 or a portion thereof, and exons 20-29, of ALK, e.g., in the amino-terminus to carboxyl-terminus direction. In some embodiments, the ALK-OPRM1 fusion polypeptide of the disclosure comprises exons 1-2, and exon 3 or a portion thereof, of OPRM1 fused to exon 20 or a portion thereof, and exons 21-29, of ALK, e.g., in the amino-terminus to carboxyl-terminus direction. In some embodiments, the ALK-GPN1 fusion polypeptide of the disclosure comprises exon 1 or a portion thereof of GPN1 fused to exon 16 or a portion thereof, and exons 17-29, of ALK, e.g., in the amino-terminus to carboxyl-terminus direction. In some embodiments, the ALK-SEC16B fusion polypeptide of the disclosure comprises exons 1-12, and exon 13 or a portion thereof, of SEC16B fused to exon 14 or a portion thereof, and exons 15-29, of ALK, e.g., in the amino-terminus to carboxyl-terminus direction. In some embodiments, the ALK-UBE2L3 fusion polypeptide of the disclosure comprises exon 1 or a portion thereof of UBE2L3 fused to exon 18 or a portion thereof, and exons 19-29, of ALK, e.g., in the amino-terminus to carboxyl-terminus direction. In some embodiments, the ALK-METTL25 fusion polypeptide of the disclosure comprises exons 1-7, and exon 8 or a portion thereof, of METTL25 fused to exon 20 or a portion thereof, and exons 21-29, of ALK, e.g., in the amino-terminus to carboxyl-terminus direction. In some embodiments, the ALK-CYS1 fusion polypeptide of the disclosure comprises exon 1 or a portion thereof of CYS1 fused to exon 20 or a portion thereof, and exons 21-29, of ALK, e.g., in the amino-terminus to carboxyl-terminus direction. In some embodiments, the ALK-ABCB11 fusion polypeptide of the disclosure comprises exons 1-25, and exon 26 or a portion thereof, of ABCB11 fused to exon 20 or a portion thereof, and exons 21-29, of ALK, e.g., in the amino-terminus to carboxyl-terminus direction. In some embodiments, the ALK-INTS9 fusion polypeptide of the disclosure comprises exons 1-7, and exon 8 or a portion thereof, of INTS9 fused to exon 20 or a portion thereof, and exons 21-29, of ALK, e.g., in the amino-terminus to carboxyl-terminus direction. In some embodiments, the ALK-CIB4 fusion polypeptide of the disclosure comprises exons 1-2, and exon 3 or a portion thereof, of CIB4 fused to exon 20 or a portion thereof, and exons 21-29, of ALK, e.g., in the amino-terminus to carboxyl-terminus direction. In some embodiments, the ALK-WDR92 fusion polypeptide of the disclosure comprises exons 1-6, and exon 7 or a portion thereof, of WDR92 fused to exon 2 or a portion thereof, and exons 3-29 of ALK, e.g., in the amino-terminus to carboxyl-terminus direction. In some embodiments, the ALK-OTX1 fusion polypeptide of the disclosure comprises exons 1-18, and exon 19 or a portion thereof, of ALK fused to exon 5 or a portion thereof of OTX1, e.g., in the amino-terminus to carboxyl-terminus direction. In some embodiments, the ALK-PDCD10 fusion polypeptide of the disclosure comprises exons 1-14, and exon 15 or a portion thereof, of ALK fused to exon 3 or a portion thereof, and exons 4-9, of PDCD10, e.g., in the amino-terminus to carboxyl-terminus direction. In some embodiments, the ALK-PTGER4 fusion polypeptide of the disclosure comprises exons 1-18, and exon 19 or a portion thereof, of ALK fused to exon 3 or a portion thereof of PTGER4, e.g., in the amino-terminus to carboxyl-terminus direction. In some embodiments, the ALK-PTPRJ fusion polypeptide of the disclosure comprises exons 1-18, and exon 19 or a portion thereof, of ALK fused to exon 2 or a portion thereof, and exons 3-25, of PTPRJ, e.g., in the amino-terminus to carboxyl-terminus direction. In some embodiments, the ALK-ZSWIM2 fusion polypeptide of the disclosure comprises exons 1-18, and exon 19 or a portion thereof, of ALK fused to exon 6 or a portion thereof, and exons 7-9, of ZSWIM2, e.g., in the amino-terminus to carboxyl-terminus direction. In some embodiments, the ALK-FHOD3 fusion polypeptide of the disclosure comprises exons 1-17, and exon 18 or a portion thereof, of ALK fused to exon 10 or a portion thereof, and exons 11-25, of FHOD3, e.g., in the amino-terminus to carboxyl-terminus direction. In some embodiments, the ALK-FILIP1L fusion polypeptide of the disclosure comprises exons 1-17, and exon 18 or a portion thereof, of ALK fused to exon 2 or a portion thereof, and exons 3-6, of FILP1L, e.g., in the amino-terminus to carboxyl-terminus direction. In some embodiments, the ALK-ITGA6 fusion polypeptide of the disclosure comprises exons 1-18, and exon 19 or a portion thereof, of ALK fused to exon 2 or a portion thereof, and exons 3-26, of ITGA6, e.g., in the amino-terminus to carboxyl-terminus direction. In some embodiments, the ALK-KCTD18 fusion polypeptide of the disclosure comprises exons 1-18, and exon 19 or a portion thereof, of ALK fused to exon 2 or a portion thereof, and exons 3-7, of KCTD18, e.g., in the amino-terminus to carboxyl-terminus direction. In some embodiments, the ALK-MAMDC4 fusion polypeptide of the disclosure comprises exons 1-19, and exon 20 or a portion thereof, of ALK fused to exon 16 or a portion thereof, and exons 17-27, of MAMDC4, e.g., in the amino-terminus to carboxyl-terminus direction. In some embodiments, the ALK-PELI1 fusion polypeptide of the disclosure comprises exon 20 or a portion thereof, and exons 21-29, of ALK, e.g., in the amino-terminus to carboxyl-terminus direction. In some embodiments, the ALK-LINC00535 fusion polypeptide of the disclosure comprises exon 20 or a portion thereof, and exons 21-29, of ALK, e.g., in the amino-terminus to carboxyl-terminus direction. In some embodiments, the ALK-CTBP1 fusion polypeptide of the disclosure comprises exons 1-8, and exon 9 or a portion thereof, of CTBP1 fused to exon 20 or a portion thereof, and exons 21-29 of ALK, e.g., in the amino-terminus to carboxyl-terminus direction. In some embodiments, the ALK-CARMIL1 fusion polypeptide of the disclosure comprises exons 1-26, and exon 27 or a portion thereof, of CARMIL1 fused to exon 20 or a portion thereof, and exons 21-29 of ALK, e.g., in the amino-terminus to carboxyl-terminus direction. In some embodiments, the ALK-ZNF513 fusion polypeptide of the disclosure comprises exon 1 or a portion thereof of ZNF513 fused to exon 1 or a portion thereof, and exons 2-29, of ALK, e.g., in the amino-terminus to carboxyl-terminus direction. In some embodiments, the ALK-TMCO3 fusion polypeptide of the disclosure comprises exons 1-5, and exon 6 or a portion thereof, of TMCO3 fused to exon 11 or a portion thereof, and exons 12-29, of ALK, e.g., in the amino-terminus to carboxyl-terminus direction. In some embodiments, the ALK-SRSF7 fusion polypeptide of the disclosure comprises exons 1-3, and exon 4 or a portion thereof, of SRSF7 fused to exon 18 or a portion thereof, and exons 19-29, of ALK, e.g., in the amino-terminus to carboxyl-terminus direction. In some embodiments, the ALK-CASP8 fusion polypeptide of the disclosure comprises exons 1-9, and exon 10 or a portion thereof, of CASP8 fused to exon 2 or a portion thereof, and exons 3-29, of ALK, e.g., in the amino-terminus to carboxyl-terminus direction. In some embodiments, the ALK-CYP51A1 fusion polypeptide of the disclosure comprises exons 1-8, and exon 9 or a portion thereof, of CYP51A1 fused to exon 3 or a portion thereof, and exons 4-29, of ALK, e.g., in the amino-terminus to carboxyl-terminus direction. In some embodiments, the ALK-GPR113 fusion polypeptide of the disclosure comprises exon 1 or a portion thereof of GPR113 fused to exon 19 or a portion thereof, and exons 20-29 of ALK, e.g., in the amino-terminus to carboxyl-terminus direction. In some embodiments, the ALK-HADHA fusion polypeptide of the disclosure comprises exons 1-4, and exon 5 or a portion thereof, of HADHA fused to exon 5 or a portion thereof, and exons 6-29, of ALK, e.g., in the amino-terminus to carboxyl-terminus direction. In some embodiments, the ALK-LRRFIP2 fusion polypeptide of the disclosure comprises exons 1-21, and exon 22 or a portion thereof, of LRRFIP2 fused to exon 20 or a portion thereof, and exons 21-29 of ALK, e.g., in the amino-terminus to carboxyl-terminus direction. In some embodiments, the ALK-MYH10 fusion polypeptide of the disclosure comprises exons 1-37, and exon 38 or a portion thereof, of MYH10 fused to exon 20 or a portion thereof, and exons 21-29 of ALK, e.g., in the amino-terminus to carboxyl-terminus direction. In some embodiments, the ALK-PDE3A fusion polypeptide of the disclosure comprises exons 1-9, and exon 10 or a portion thereof, of PDE3A fused to exon 8 or a portion thereof, and exons 9-29, of ALK, e.g., in the amino-terminus to carboxyl-terminus direction. In some embodiments, the ALK-PLEC fusion polypeptide of the disclosure comprises exons 1-8, and exon 9 or a portion thereof, of PLEC fused to exon 20 or a portion thereof, and exons 21-29 of ALK, e.g., in the amino-terminus to carboxyl-terminus direction. In some embodiments, the ALK-QKI fusion polypeptide of the disclosure comprises exon 1, and exon 2 or a portion thereof, of QKI fused to exon 20 or a portion thereof, and exons 21-29 of ALK, e.g., in the amino-terminus to carboxyl-terminus direction. In some embodiments, the ALK-SASH1 fusion polypeptide of the disclosure comprises exons 1-13, and exon 14 or a portion thereof, of SASH1 fused to exon 18 or a portion thereof, and exons 19-29, of ALK, e.g., in the amino-terminus to carboxyl-terminus direction. In some embodiments, the ALK-SRSF7 fusion polypeptide of the disclosure comprises exons 1-4, and exon 5 or a portion thereof, of SRSF7 fused to exon 18 or a portion thereof, and exons 19-29, of ALK, e.g., in the amino-terminus to carboxyl-terminus direction. In some embodiments, the ALK-VASP fusion polypeptide of the disclosure comprises exons 1-3, and exon 4 or a portion thereof, of VASP fused to exon 7 or a portion thereof, and exons 8-29, of ALK, e.g., in the amino-terminus to carboxyl-terminus direction. In some embodiments, the ALK-ZNF446 fusion polypeptide of the disclosure comprises exons 1-6, and exon 7 or a portion thereof, of ZNF446 fused to exon 20 or a portion thereof, and exons 21-29 of ALK, e.g., in the amino-terminus to carboxyl-terminus direction. In some embodiments, the ALK-SOX13 fusion polypeptide of the disclosure comprises exon 18 or a portion thereof, and exons 19-29, of ALK, e.g., in the amino-terminus to carboxyl-terminus direction. In some embodiments, the ALK-YPEL5 fusion polypeptide of the disclosure comprises exon 18 or a portion thereof, and exons 19-29, of ALK, e.g., in the amino-terminus to carboxyl-terminus direction. In some embodiments, the ALK-CAPN14 fusion polypeptide of the disclosure comprises exons 1-13, and exon 14 or a portion thereof, of ALK fused to exon 3 or a portion thereof, and exons 4-22, of CAPN14, e.g., in the amino-terminus to carboxyl-terminus direction. In some embodiments, the ALK-MAP3K9 fusion polypeptide of the disclosure comprises exon 1 or a portion thereof of ALK fused to exon 4 or a portion thereof, and exons 5-13, of MAP3K9, e.g., in the amino-terminus to carboxyl-terminus direction. In some embodiments, the ALK-SNX17 fusion polypeptide of the disclosure comprises exons 1-12, and exon 13 or a portion thereof, of ALK fused to exon 3 or a portion thereof, and exons 4-15, of SNX17, e.g., in the amino-terminus to carboxyl-terminus direction. In some embodiments, the ALK-HSmBP3 fusion polypeptide of the disclosure comprises exons 1-18, and exon 19 or a portion thereof, of ALK fused to exon 4 or a portion thereof, and exons 5-7, of HS1BP3, e.g., in the amino-terminus to carboxyl-terminus direction. In some embodiments, the ALK-CREBBP fusion polypeptide of the disclosure comprises exons 1-2, and exon 3 or a portion thereof, of ALK fused to exon 2 or a portion thereof, and exons 3-31, of CREBBP, e.g., in the amino-terminus to carboxyl-terminus direction. In some embodiments, the ALK-PAQR4 fusion polypeptide of the disclosure comprises exons 1-2, and exon 3 or a portion thereof, of ALK fused to exon 1 or a portion thereof, and exons 2-3, of PAQR4, e.g., in the amino-terminus to carboxyl-terminus direction. In some embodiments, the ALK-APH1A fusion polypeptide of the disclosure comprises exons 1-3, and exon 4 or a portion thereof, of ALK fused to exon 4 or a portion thereof, and exons 5-6, of APH1A, e.g., in the amino-terminus to carboxyl-terminus direction.

[0244] In some embodiments, an ALK fusion polypeptide of the disclosure comprises the corresponding amino acid sequence as listed in Table 8, or an amino acid sequence having at least about 70% (e.g., any of about 70%, 71%, 72%, 73%, 74%, 75%, 76%, 77%, 78%, 79%, 80%, 81%, 82%, 83%, 84%, 85%, 86%, 87%, 88%, 89%, 90%, 91%, 92%, 93%, 94%, 95%, 96%, 97%, 98%, 99%, or 100%) sequence homology thereto.

TABLE 8
ALK fusion polypeptide amino acid sequences.

| ALK Fusion | | SEQ ID |
|---|---|---|
| Polypeptide | ALK Fusion Polypeptide Amino Acid Sequence | NO |
| ALK- | MMSFVQKGSWLLLALLHPTIILAQQEAVEGGCSHLGQSYADRDVWKPEPCQICV | 44 |
| COL3A1 | CDSGSVLCDDIICDDQELDCPNPEIPFGECCAVCPQPPTAPTRPPNGQGPQGPK | |
| | GDPGPPGIPGRNGDPGIPGQPGSPGSPGPPGICESCPTGPQNYSPQYDSYDVKS | |
| | GVAVGGLAGYPGPAGPPGPPGPPGTSGHPGSPGSPGYQGPPGEPGQAGPSGPPG | |
| | PPGAIGPSGPAGKDGESGRPGRPGERGLPGPPGIKGPAGIPGFPGMKGHRGFDG | |
| | RNGEKGETGAPGLKGENGLPGENGAPGPMGPRGAPGERGRPGLPGAAGARGNDG | |
| | ARGSDGQPGPPGPPGTAGFPGSPGAKGEVGPAGSPGSNGAPGQRGEPGPQGHAG | |
| | AQGPPGPPGINGSPGGKGEMGPAGIPGAPGLMGARGPPGPAGANGAPGLRGGAG | |
| | EPGKNGAKGEPGPRGERGEAGIPGVPGAKGEDGKDGSPGEPGANGLPGAAGERG | |
| | APGFRGPAGPNGIPGEKGPAGERGAPGPAGPRGAAGEPGRDGVPGGPGMRGMPG | |
| | SPGGPGSDGKPGPPGSQGESGRPGPPGPSGPRGQPGVMGFPGPKGNDGAPGKNG | |
| | ERGGPGGPGPQGPPGKNGETGPQGPPGPTGPGGDKGDTGPPGPQGLQGLPGTGG | |
| | PPGENGKPGEPGPKGDAGAPGAPGGKGDAGAPGERGPPGLAGAPGLRGGAGPPG | |
| | PEGGKGAAGPPGPPGAAGTPGLQGMPGERGGLGSPGPKGDKGEPGGPGADGVPG | |
| | KDGPRGPTGPIGPPGPAGQPGDKGEGGAPGLPGIAGPRGSPGERGETGPPGPAG | |
| | FPGAPGQNGEPGGKGERGAPGEKGEGGPPGVAGPPGGSGPAGPPGPQGVKGERG | |
| | SPGGPGAAGFPGARGLPGPPGSNGNPGPPGPSGSPGKDGPPGPAGNTGAPGSPG | |
| | VSGPKGDAGQPGEKGSPGAQGPPGAPGPLGIAGITGARGLAGPPGMPGPRGSPG | |
| | PQGVKGESGKPGANGLSGERGPPGPQGLPGLAGTAGEPGRDGNPGSDGLPGRDG | |
| | SPGGKGDRGENGSPGAPGAPGHPGPPGPVGPAGKSGDRGESGPAGPAGAPGPAG | |
| | SRGAPGPQGPRGDKGETGERGAAGIKGHRGFPGNPGAPGSPGPAGQQGAIGSPG | |
| | PAGPRGPVGPSGPPGKDGTSGHPGPIGPPGPRGNRGERGSEGSPGHPGQPGPPG | |
| | PPGAPGPCCGGVGAAAIAGIGGEKAGGFAPYYGDEPMDFKINTDEIMTSLKSVN | |
| | GQIESLISPDGSRKNPARNCRDLKFCHPELKSVSPTPEPHLPLSLILSVVTSAL | |
| | VAALVLAFSGIMIVYRRKHQELQAMQMELQSPEYKLSKLRTSTIMTDYNPNYCF | |
| | AGKTSSISDLKEVPRKNITLIRGLGHGAFGEVYEGQVSGMPNDPSPLQVAVKTL | |
| | PEVCSEQDELDELMEALIISKFNHQNIVRCIGVSLQSLPRFILLELMAGGDLKS | |
| | FLRETRPRPSQPSSLAMLDLLHVARDIACGCQYLEENHFIHRDIAARNCLLTCP | |
| | GPGRVAKIGDFGMARDIYRASYYRKGGCAMLPVKWMPPEAFMEGIFTSKIDTWS | |
| | FGVLLWEIFSLGYMPYPSKSNQEVLEFVTSGGRMDPPKNCPGPVYRIMTQCWQH | |
| | QPEDRPNFAIILERIEYCTQDPDVINTALPIEYGPLVEEEEKVPVRPKDPEGVP | |
| | PLLVSQQAKREEERSPAAPPPLPTTSSGKAAKKPTAAEISVRVPRGPAVEGGHV | |
| | NMAFSQSNPPSELHKVHGSRNKPTSLWNPTYGSWFTEKPTKKNNPIAKKEPHDR | |
| | GNLGLEGSCTVPPNVATGRLPGASLLLEPSSLTANMKEVPLFRLRHFPCGNVNY | |
| | GYQQQGLPLEAATAPGAGHYEDTILKSKNSMNQPGP | |
| ALK- | MSGEVRLRQLEQFILDGPAQTNGQCFSVETLLDILICLYDECNNSPLRREKNIL | 45 |
| CDC42BPA | EYLEWAKPFTSKVKQMRLHREDFEILKVIGRGAFGEVAVVKLKNADKVFAMKIL | |
| | NKWEMLKRAETACFREERDVLVNGDNKWITTLHYAFQDDNNLYLVMDYYVGGDL | |
| | LTLLSKFEDRLPEDMARFYLAEMVIAIDSVHQLHYVHRDIKPDNILMDMNGHIR | |
| | LADFGSCLKLMEDGTVQSSVAVGTPDYISPEILQAMEDGKGRYGPECDWWSLGV | |
| | CMYEMLYGETPFYAESLVETYGKIMNHKERFQFPAQVTDVSENAKDLIRRLICS | |
| | REHRLGQNGIEDFKKHPFFSGIDWDNIRNCEAPYIPEVSSPTDTSNFDVDDDCL | |
| | KNSETMPPPTHTAFSGHHLPFVGFTYTSSCVLSDRSCLRVTAGPTSLDLDVNVQ | |
| | RTLDNNLATEAYERRIKRLEQEKLELSRKLQESTQTVQALQYSTVDGPLTASKD | |
| | LEIKNLKEEIEKLRKQVTESSHLEQQLEEANAVRQELDDAFRQIKAYEKQIKTL | |
| | QQEREDLNKELVQASERLKNQSKELKDAHCQRKLAMQEFMEINERLTELHTQKQ | |
| | KLARHVRDKEEEVDLVMQKVESLRQELRRTERAKKELEVHTEALAAEASKDRKL | |
| | REQSEHYSKQLENELEGLKQKQISYSPGVCSIEHQQEITKLKTDLEKKSIFYEE | |
| | ELSKREGIHANEIKNLKKELHDSEGQQLALNKEIMILKDKLEKTRRESQSEREE | |
| | FESEFKQQYEREKVLLTEENKKLTSELDKLTTLYENLSIHNQQLEEEVKDLADK | |
| | KESVAHWEAQITEIIQWVSDEKDARGYLQALASKMTEELEALRNSSLGTRATDM | |
| | PWKMRRFAKLDMSARLELQSALDAEIRAKQAIQEELNKVKASNIITECKLKDSE | |
| | KKNLELLSEIEQLIKDTEELRSEKVYRRKHQELQAMQMELQSPEYKLSKLRTST | |
| | IMTDYNPNYCFAGKTSSISDLKEVPRKNITLIRGLGHGAFGEVYEGQVSGMPND | |
| | PSPLQVAVKTLPEVCSEQDELDELMEALIISKENHQNIVRCIGVSLQSLPRFIL | |
| | LELMAGGDLKSFLRETRPRPSQPSSLAMLDLLHVARDIACGCQYLEENHFIHRD | |
| | IAARNCLLTCPGPGRVAKIGDFGMARDIYRASYYRKGGCAMLPVKWMPPEAFME | |
| | GIFTSKTDTWSFGVLLWEIFSLGYMPYPSKSNQEVLEFVTSGGRMDPPKNCPGP | |
| | VYRIMTQCWQHQPEDRPNFAIILERIEYCTQDPDVINTALPIEYGPLVEEEEKV | |
| | PVRPKDPEGVPPLLVSQQAKREEERSPAAPPPLPTTSSGKAAKKPTAAEISVRV | |
| | PRGPAVEGGHVNMAFSQSNPPSELHKVHGSRNKPTSLWNPTYGSWFTEKPTKKN | |
| | NPIAKKEPHDRGNLGLEGSCTVPPNVATGRLPGASLLLEPSSLTANMKEVPLER | |
| | LRHFPCGNVNYGYQQQGLPLEAATAPGAGHYEDTILKSKNSMNQPGP | |
| ALK- | MELQAARACFALLWGCALAAAAAAQGKEVVLLDFAAAGGELGWLTHPYGKGWDL | 46 |
| EPHA2 | MQNIMNDMPIYMYSVCNVMSGDQDNWLRTNWVYRGEAERIFIELKFTVRDCNSF | |
| | PGGASSCKETFNLYYAESDLDYGTNFQKRLFTKIDTIAPDEITVSSDFEARHVK | |
| | LNVEERSVGPLTRKGFYLAFQDIGACVALLSVRVYYKKCPELLQGLAHFPETIA | |
| | GSDAPSLATVAGTCVDHAVVPPGGEEPRMHCAVDGEWLVPIGQCLCQAGYEKVE | |
| | DACQVSPTPEPHLPLSLILSVVTSALVAALVLAFSGIMIVYRRKHQELQAMQME | |
| | LQSPEYKLSKLRTSTIMTDYNPNYCFAGKTSSISDLKEVPRKNITLIRGLGHGA | |
| | FGEVYEGQVSGMPNDPSPLQVAVKTLPEVCSEQDELDELMEALIISKENHQNIV | |
| | RCIGVSLQSLPRFILLELMAGGDLKSFLRETRPRPSQPSSLAMLDLLHVARDIA | |
| | CGCQYLEENHFIHRDIAARNCLLTCPGPGRVAKIGDFGMARDIYRASYYRKGGC | |
| | AMLPVKWMPPEAFMEGIFTSKTDTWSFGVLLWEIFSLGYMPYPSKSNQEVLEFV | |
| | TSGGRMDPPKNCPGPVYRIMTQCWQHQPEDRPNFAIILERIEYCTQDPDVINTA | |
| | LPIEYGPLVEEEEKVPVRPKDPEGVPPLLVSQQAKREEERSPAAPPPLPTTSSG | |
| | KAAKKPTAAEISVRVPRGPAVEGGHVNMAFSQSNPPSELHKVHGSRNKPTSLWN | |
| | PTYGSWFTEKPTKKNNPIAKKEPHDRGNLGLEGSCTVPPNVATGRLPGASLLLE | |
| | PSSLTANMKEVPLFRLRHFPCGNVNYGYQQQGLPLEAATAPGAGHYEDTILKSK | |
| | NSMNQPGP | |
| ALK- | MAVAELYTQYNRVWIPDPEEVWKSAEIAKDYRVGDKVLRLLLEDGTELDYSVNP | 47 |
| MYO5C | ESLPPLRNPDILVGENDLTALSYLHEPAVLHNLRIRFAESKLIYTYSGIILVAM | |
| | NPYKQLPIYGDAIIHAYSGQNMGDMDPHIFAVAEEAYKQMARNNRNQSIIVSGE | |
| | SGAGKTVSARYAMRYFATVSKSGSNAHVEDKVLASNPITEAVGNAKTTRNDNSS | |
| | RFGKYTEISFDEQNQIIGANMSTYLLEKSRVVFQSENERNYHIFYQLCASAQQS | |
| | EFKHLKLGSAEEFNYTRMGGNTVIEGVNDRAEMVETQKTFTLLGFKEDFQMDVF | |
| | KILAAILHLGNVQITAVGNERSSVSEDDSHLKVFCELLGLESGRVAQWLCNRKI | |
| | VTSSETVVKPMTRPQAVNARDALAKKIYAHLFDFIVERINQALQFSGKQHTFIG | |
| | VLDIYGFETFDVNSFEQFCINYANEKLQQQFNMHVFKLEQEEYMKEDIPWTLID | |
| | FYDNQPVIDLIEAKMGILELLDEECLLPHGTDENWLQKLYNNFVNRNPLFEKPR | |
| | MSNTSFVIQHFADKVEYKCEGFLEKNRDTVYDMLVEILRASKFHLCANFFQENP | |
| | TPPSPFGSMITVKSAKQVIKPNSKHFRTTVGSKFRSSLYLLMETLNATTPHYVR | |
| | CIKPNDEKLPFEFDSKRIVQQLRACGVLETIRISAQSYPSRWTYIEFYSRYGIL | |
| | MTKQELSFSDKKEVCKVVLHRLIQDSNQYQFGKTKIFFRAGQVAYLEKLRLDKL | |
| | RQSCVMVQKHMRGWLQRKKFLRERRAALIIQQYFRGQQTVRKAITAVALKEAWA | |
| | AIIIQKHCRGYLVRSLYQLIRMATITMQAYSRGFLARRRYRKMLEEHKAVILQK | |
| | YARAWLARRRFQSIRRFVLNIQLTYRVQRLQKKLEDQNKENHGLVEKLTSLAAL | |
| | RAGDVEKIQKLEAELEKAATHRRNYEEKGKRYRDAVEEKLAKLQKHNSELETQK | |
| | EQIQLKLQEKTEELKEKMDNLTKQLFDDVQKEERQRMLLEKSFELKTQDYEKQI | |
| | QSLKEEIKALKDEKMQLQHLVEGEHVTSDGLKAEVARLSKQVKTISEFEKEIEL | |
| | LQAQKIDVEKHVQSQKREMREKMSEITKQLLESYDIEDVRSRLSVEDLEHLNED | |
| | GELWFAYEGLKKATRVLESHFQSQKDCYEKEIEALNFKVVHLSQEINHLQKLER | |
| | EENDINESIRHEVTRLISENMMIPDFKQQISELEKQKQDLEIRLNEQAEKMKVY | |
| | RRKHQELQAMQMELQSPEYKLSKLRISTIMTDYNPNYCFAGKTSSISDLKEVPR | |
| | KNITLIRGLGHGAFGEVYEGQVSGMPNDPSPLQVAVKTLPEVCSEQDELDELME | |
| | ALIISKENHQNIVRCIGVSLQSLPRFILLELMAGGDLKSFLRETRPRPSQPSSL | |
| | AMLDLLHVARDIACGCQYLEENHFIHRDIAARNCLLTCPGPGRVAKIGDFGMAR | |
| | DIYRASYYRKGGCAMLPVKWMPPEAFMEGIFTSKIDTWSFGVLLWEIFSLGYMP | |
| | YPSKSNQEVLEFVTSGGRMDPPKNCPGPVYRIMTQCWQHQPEDRPNFAIILERI | |
| | EYCTQDPDVINTALPIEYGPLVEEEEKVPVRPKDPEGVPPLLVSQQAKREEERS | |
| | PAAPPPLPTTSSGKAAKKPTAAEISVRVPRGPAVEGGHVNMAFSQSNPPSELHK | |
| | VHGSRNKPTSLWNPTYGSWFTEKPTKKNNPIAKKEPHDRGNLGLEGSCTVPPNV | |
| | ATGRLPGASLLLEPSSLTANMKEVPLFRLRHFPCGNVNYGYQQQGLPLEAATAP | |
| | GAGHYEDTILKSKNSMNQPGP | |
| ALK- | MEVAVEKAVAAAAAASAAASGGPSAAPSGENEAESRQGPDSERGGEAARLNLLD | 48 |
| TRIM24 | TCAVCHQNIQSRAPKLLPCLHSFCQRCLPAPQRYLMLPAPMLGSAETPPPVPAP | |
| | GSPVSGSSPFATQVGVIRCPVCSQECAERHIIDNFFVKDTTEVPSSTVEKSNQV | |
| | CTSCEDNAEANGFCVECVEWLCKTCIRAHQRVKFTKDHTVRQKEEVSPEAVGVT | |
| | SQRPVFCPFHKKEQLKLYCETCDKLTCRDCQLLEHKEHRYQFIEEAFQNQKVII | |
| | DTLITKLMEKTKYIKFTGNQIQNRIIEVNQNQKQVEQDIKVAIFTLMVEINKKG | |
| | KALLHQLESLAKDHRMKLMQQQQEVAGLSKQLEHVMHFSKWAVSSGSSTALLYS | |
| | KRLITYRLRHLLRARCDASPVTNNTIQFHCDPSFWAQNIINLGSLVIEDKESQP | |
| | QMPKQNPVVEQNSQPPSGLSSNQLSKFPTQISLAQLRLQHMQQQQPPPRLINFQ | |
| | NHSPKPNGPVLPPHPQQLRYPPNQNIPRQAIKPNPLQMAFLAQQAIKQWQISSG | |
| | QGTPSTTNSTSSTPSSPTITSAAGYDGKAFGSPMIDLSSPVGGSYNLPSLPDID | |
| | CSSTIMLDNIVRKDTNIDHGQPRPPSNRTVQSPNSSVPSPGLAVYRRKHQELQA | |
| | MQMELQSPEYKLSKLRISTIMTDYNPNYCFAGKTSSISDLKEVPRKNITLIRGL | |
| | GHGAFGEVYEGQVSGMPNDPSPLQVAVKTLPEVCSEQDELDELMEALIISKENH | |
| | QNIVRCIGVSLQSLPRFILLELMAGGDLKSFLRETRPRPSQPSSLAMLDLLHVA | |
| | RDIACGCQYLEENHFIHRDIAARNCLLTCPGPGRVAKIGDFGMARDIYRASYYR | |
| | KGGCAMLPVKWMPPEAFMEGIFTSKIDTWSFGVLLWEIFSLGYMPYPSKSNQEV | |
| | LEFVTSGGRMDPPKNCPGPVYRIMTQCWQHQPEDRPNFAIILERIEYCTQDPDV | |
| | INTALPIEYGPLVEEEEKVPVRPKDPEGVPPLLVSQQAKREEERSPAAPPPLPT | |
| | TSSGKAAKKPTAAEISVRVPRGPAVEGGHVNMAFSQSNPPSELHKVHGSRNKPT | |
| | SLWNPTYGSWFTEKPTKKNNPIAKKEPHDRGNLGLEGSCTVPPNVATGRLPGAS | |
| | LLLEPSSLTANMKEVPLFRLRHFPCGNVNYGYQQQGLPLEAATAPGAGHYEDTI | |
| | LKSKNSMNQPGP | |
| ALK- | MQAAALPEEIRWLLEDAEEFLAEGLRNENLSAVARDHRDHILRGFQQIKARYYW | 49 |
| SKAP1 | DFQPQVYRRKHQELQAMQMELQSPEYKLSKLRTSTIMTDYNPNYCFAGKTSSIS | |
| | DLKEVPRKNITLIRGLGHGAFGEVYEGQVSGMPNDPSPLQVAVKTLPEVCSEQD | |
| | ELDFLMEALIISKFNHQNIVRCIGVSLQSLPRFILLELMAGGDLKSFLRETRPR | |
| | PSQPSSLAMLDLLHVARDIACGCQYLEENHFIHRDIAARNCLLTCPGPGRVAKI | |
| | GDFGMARDIYRASYYRKGGCAMLPVKWMPPEAFMEGIFTSKTDTWSFGVLLWEI | |
| | FSLGYMPYPSKSNQEVLEFVTSGGRMDPPKNCPGPVYRIMTQCWQHQPEDRPNF | |
| | AIILERIEYCTQDPDVINTALPIEYGPLVEEEEKVPVRPKDPEGVPPLLVSQQA | |
| | KREEERSPAAPPPLPTTSSGKAAKKPTAAEISVRVPRGPAVEGGHVNMAFSQSN | |
| | PPSELHKVHGSRNKPTSLWNPTYGSWFTEKPTKKNNPIAKKEPHDRGNLGLEGS | |
| | CTVPPNVATGRLPGASLLLEPSSLTANMKEVPLFRLRHFPCGNVNYGYQQQGLP | |
| | LEAATAPGAGHYEDTILKSKNSMNQPGP | |
| ALK- | MFTLSQTSRAWFIDRARQAREERLVQKERERAAVVIQAHVRSFLCRSRLQRDIR | 50 |
| UBE3B | REIDDFFKADDPESTKRSALCIFKIARKLLFLFRIKEDNERFEKLCRSILSSMD | |
| | AENEPKVWYVSLACSKDLTLLWIQQIKNILWYCCDFLKQLKPEILQDSRLITLY | |
| | LTMLVTFTDTSTWKILRGKGESLRPAMNHICANIMGHLNQHGFYSVLQILLTRG | |
| | LARPRPCLSKGTLTAAFSLALRPVIAAQFSDNLIRPFLIHIMSVPALVTHLSTV | |
| | TPERLTVLESHDMLRKFIIFLRDQDRCRDVCESLEGCHTLCLMVYRRKHQELQA | |
| | MQMELQSPEYKLSKLRTSTIMTDYNPNYCFAGKTSSISDLKEVPRKNITLIRGL | |
| | GHGAFGEVYEGQVSGMPNDPSPLQVAVKTLPEVCSEQDELDELMEALIISKFNH | |
| | QNIVRCIGVSLQSLPRFILLELMAGGDLKSFLRETRPRPSQPSSLAMLDLLHVA | |
| | RDIACGCQYLEENHFIHRDIAARNCLLTCPGPGRVAKIGDFGMARDIYRASYYR | |
| | KGGCAMLPVKWMPPEAFMEGIFTSKTDTWSFGVLLWEIFSLGYMPYPSKSNQEV | |
| | LEFVTSGGRMDPPKNCPGPVYRIMTQCWQHQPEDRPNFAIILERIEYCTQDPDV | |
| | INTALPIEYGPLVEEEEKVPVRPKDPEGVPPLLVSQQAKREEERSPAAPPPLPT | |
| | TSSGKAAKKPTAAEISVRVPRGPAVEGGHVNMAFSQSNPPSELHKVHGSRNKPT | |
| | SLWNPTYGSWFTEKPTKKNNPIAKKEPHDRGNLGLEGSCTVPPNVATGRLPGAS | |
| | LLLEPSSLTANMKEVPLFRLRHFPCGNVNYGYQQQGLPLEAATAPGAGHYEDTI | |
| | LKSKNSMNQPGP | |
| ALK-TNS3 | MEEGHGLDLTYITERIIAVSFPAGCSEESYLHNLQEVTRMLKSKHGDNYLVLNL | 51 |
| | SEKRYDLTKLNPKIMDVGWPELHAPPLDKMCTICKAQESWLNSNLQHVVVIHCR | |
| | GGKGRIGVVISSYMHFTNVSASADQALDRFAMKKFYDDKVSALMQPSQKRYVQF | |
| | LSGLLSGSVKMNASPLFLHFVILHGTPNFDTGGVCRPFLKLYQAMQPVYTSGIY | |
| | NVGPENPSRICIVIEPAQLLKGDVMVKCYHKKYRSATRDVIFRLQFHTGAVQGY | |
| | GLVFGKEDLDNASKDDRFPDYGKVELVFSATPEKIQGSEHLYNDHGVIVDYNTT | |
| | DPLIRWDSYENLSADGEVLHTQGPVDGSLYAKVRKKSSSDPGIPGGPQAIPATN | |
| | SPDHSDHTLSVSSDSGHSTASARTDKTEERLAPGTRRGLSAQEKAELDQLLSGF | |
| | GLEDPGSSLKEMTDARSKYSGTRHVVPAQVHVNGDAALKDRETDILDDEMPHHD | |
| | LHSVDSLGTLSSSEGPQSAHLGPFTCHKSSQNSLLSDGFGSNVGEDPQGTLVPD | |
| | LGLGMDGPYERERTFGSREPKQPQPLLRKPSVSAQMQAYGQSSYSTQTWVRQQQ | |
| | MVVAHQYSFAPDGEARLVSRCPADNPGLVQAQPRVPLTPTRGTSSRVAVQRGVG | |
| | SGPHPPDTQQPSPSKAFKPRFPGDQVVNGAGPELSTGPSPGSPTLDIDQSIEQL | |
| | NRLILELDPTFEPIPTHMNALGSQANGSVSPDSVGGGLRASSRLPDTGEGPSRA | |
| | TGRQGSSAEQPLGGRLRKLSLGQYDNDAGGQLPFSKCAWGKAGVDYAPNLPPFP | |
| | SPADVKETMTPGYPQDLDIIDGRILSSKESMCSTPAFPVSPETPYVKTALRHPP | |
| | FSPPEPPLSSPASQHKGGREPRSCPETLTHAVGMSESPIGPKSTMLRADASSTP | |
| | SFQQAFASSCTISSNGPGQRRESSSSAERQWVESSPKPMVSLLGSGRPTGSPLS | |
| | AEFSGTRKDSPVLSCFPPSELQAPFHSHELSLAEPPDSLAPPSSQAFLGFGTAP | |
| | VGSGLPPEEDLGALLANSHGASPTPSIPLTATGAADNGFLSHNFLTVAPGHSSH | |
| | HSPGLQGQGVTLPGQPPLPEKKRASEGDRSLGSVSPSSSGFSSPHSGSTISIPF | |
| | PNVLPDFSKASEAASPLPDSPGDKLVIVKFVQDTSKFWYKADISREQAIAMLKD | |
| | KEPGSFIVRDSHSFRGAYGLAMKVATPPPSVLQLNKKAGDLANELVRHFLIECT | |
| | PKGVRLKGCSNEPYFVYRRKHQELQAMQMELQSPEYKLSKLRTSTIMTDYNPNY | |
| | CFAGKTSSISDLKEVPRKNITLIRGLGHGAFGEVYEGQVSGMPNDPSPLQVAVK | |
| | TLPEVCSEQDELDFLMEALIISKENHQNIVRCIGVSLQSLPRFILLELMAGGDL | |
| | KSFLRETRPRPSQPSSLAMLDLLHVARDIACGCQYLEENHFIHRDIAARNCLLT | |
| | CPGPGRVAKIGDFGMARDIYRASYYRKGGCAMLPVKWMPPEAFMEGIFTSKTDT | |
| | WSFGVLLWEIFSLGYMPYPSKSNQEVLEFVTSGGRMDPPKNCPGPVYRIMTQCW | |
| | QHQPEDRPNFAIILERIEYCTQDPDVINTALPIEYGPLVEEEEKVPVRPKDPEG | |
| | VPPLLVSQQAKREEERSPAAPPPLPTTSSGKAAKKPTAAEISVRVPRGPAVEGG | |
| | HVNMAFSQSNPPSELHKVHGSRNKPTSLWNPTYGSWFTEKPTKKNNPIAKKEPH | |
| | DRGNLGLEGSCTVPPNVATGRLPGASLLLEPSSLTANMKEVPLFRLRHFPCGNV | |
| | NYGYQQQGLPLEAATAPGAGHYEDTILKSKNSMNQPGP | |
| ALK- | MEEKEDKHQQHKIEDAAITYVSENEEIKHEEKPGKSIHHSKSHVGRGRIYYAKF | 52 |
| C2orf73 | INTNARTYNEPFPYIDPKKGPEIQGDWWSHGKALEPVFLPPYDSKSTQRSDFQK | |
| | PSCPLVLPVKHSKMQKPSCGIVYRRKHQELQAMQMELQSPEYKLSKLRTSTIMT | |
| | DYNPNYCFAGKTSSISDLKEVPRKNITLIRGLGHGAFGEVYEGQVSGMPNDPSP | |
| | LQVAVKTLPEVCSEQDELDELMEALIISKENHQNIVRCIGVSLQSLPRFILLEL | |
| | MAGGDLKSFLRETRPRPSQPSSLAMLDLLHVARDIACGCQYLEENHFIHRDIAA | |
| | RNCLLTCPGPGRVAKIGDFGMARDIYRASYYRKGGCAMLPVKWMPPEAFMEGIF | |
| | TSKTDTWSFGVLLWEIFSLGYMPYPSKSNQEVLEFVTSGGRMDPPKNCPGPVYR | |
| | IMTQCWQHQPEDRPNFAIILERIEYCTQDPDVINTALPIEYGPLVEEEEKVPVR | |
| | PKDPEGVPPLLVSQQAKREEERSPAAPPPLPTTSSGKAAKKPTAAEISVRVPRG | |
| | PAVEGGHVNMAFSQSNPPSELHKVHGSRNKPTSLWNPTYGSWFTEKPTKKNNPI | |
| | AKKEPHDRGNLGLEGSCTVPPNVATGRLPGASLLLEPSSLTANMKEVPLFRLRH | |
| | FPCGNVNYGYQQQGLPLEAATAPGAGHYEDTILKSKNSMNQPGP | |
| ALK-AZI2 | MDALVEDDICILNHEKAHKRDTVTPVSIYSGDESVASHFALVTAYEDIKKRLKD | 53 |
| | SEKENSLLKKRIRFLEEKLIARFEEETSSVGREQVNKAYHAYREVCIDRDNLKS | |
| | KLDKMNKDNSESLKVLNEQLQSKEVELLQLRTEVETQQVMRNLNPPSSNWEVEK | |
| | LSCDLKIHGLEQELELMRKECSDLKIELQKAKQTDPYQEDNLKSRDLQKLSISS | |
| | DNMQHAYWELKREMSNLHLVTQVQAELLRKLKTSTAIKKVYRRKHQELQAMQME | |
| | LQSPEYKLSKLRTSTIMTDYNPNYCFAGKTSSISDLKEVPRKNITLIRGLGHGA | |
| | FGEVYEGQVSGMPNDPSPLQVAVKTLPEVCSEQDELDELMEALIISKENHQNIV | |
| | RCIGVSLQSLPRFILLELMAGGDLKSFLRETRPRPSQPSSLAMLDLLHVARDIA | |
| | CGCQYLEENHFIHRDIAARNCLLTCPGPGRVAKIGDFGMARDIYRASYYRKGGC | |
| | AMLPVKWMPPEAFMEGIFTSKTDTWSFGVLLWEIFSLGYMPYPSKSNQEVLEFV | |
| | TSGGRMDPPKNCPGPVYRIMTQCWQHQPEDRPNFAIILERIEYCTQDPDVINTA | |
| | LPIEYGPLVEEEEKVPVRPKDPEGVPPLLVSQQAKREEERSPAAPPPLPTTSSG | |
| | KAAKKPTAAEISVRVPRGPAVEGGHVNMAFSQSNPPSELHKVHGSRNKPTSLWN | |
| | PTYGSWFTEKPTKKNNPIAKKEPHDRGNLGLEGSCTVPPNVATGRLPGASLLLE | |
| | PSSLTANMKEVPLFRLRHFPCGNVNYGYQQQGLPLEAATAPGAGHYEDTILKSK | |
| | NSMNQPGP | |
| ALK- | MRLHLLLLLALCGAGTTAAELSYSLRGNWSICNGNGSLELPGAVPGCVHSALFQ | 54 |
| MANBA | QGLIQDSYYRENDLNYRWVSLDNWTYSKEFKIPFEISKWQKVNLILEGVDTVSK | |
| | ILFNEVTIGETDNMFNRYSFDITNVVRDVNSIELRFQSAVLYAAQQSKAHTRYQ | |
| | VPPDCPPLVQKGECHVNFVRKEQCSFSWDWGPSFPTQGIWKDVRIEAYNICHLN | |
| | YFTFSPIYDKSAQEWNLEIESTFDVVSSKPVGGQVIVAIPKLQTQQTYSIELQP | |
| | GKRIVELFVNISKNITVETWWPHGHGNQTGYNMTVLFELDGGLNIEKSAKVYFR | |
| | TVELIEEPIKGSPGLSFYFKINGFPIFLKGSNWIPADSFQDRVTSELLRLLLQS | |
| | VVDANMNTLRVWGGGIYEQDEFYELCDELGIMVWQDFMFACALYPTDQGELDSV | |
| | TAEVAYQIKRLKSHPSIIIWSGNNENEEALMMNWYHISFTDRPIYIKDYVTLYV | |
| | KNIRELVLAGDKSRPFITSSPTNGAETVAEAWVSQNPNSNYFGDVHFYDYISDC | |
| | WNWKVFPKARFASEYGYQSWPSFSTLEKVSSTEDWSFNSKFSLHRQHHEGGNKQ | |
| | MLYQAGLHFKLPQSTDPLRTFKDTIYLTQVMQAQCVKTETEFYRRSRSEIVDQQ | |
| | GHTMGALYWQLNDIWQAPSWASLVYRRKHQELQAMQMELQSPEYKLSKLRISTI | |
| | MTDYNPNYCFAGKTSSISDLKEVPRKNITLIRGLGHGAFGEVYEGQVSGMPNDP | |
| | SPLQVAVKTLPEVCSEQDELDFLMEALIISKENHQNIVRCIGVSLQSLPRFILL | |
| | ELMAGGDLKSFLRETRPRPSQPSSLAMLDLLHVARDIACGCQYLEENHFIHRDI | |
| | AARNCLLTCPGPGRVAKIGDFGMARDIYRASYYRKGGCAMLPVKWMPPEAFMEG | |
| | IFTSKTDTWSFGVLLWEIFSLGYMPYPSKSNQEVLEFVTSGGRMDPPKNCPGPV | |
| | YRIMTQCWQHQPEDRPNFAIILERIEYCTQDPDVINTALPIEYGPLVEEEEKVP | |
| | VRPKDPEGVPPLLVSQQAKREEERSPAAPPPLPTTSSGKAAKKPTAAEISVRVP | |
| | RGPAVEGGHVNMAFSQSNPPSELHKVHGSRNKPTSLWNPTYGSWFTEKPTKKNN | |
| | PIAKKEPHDRGNLGLEGSCTVPPNVATGRLPGASLLLEPSSLTANMKEVPLFRL | |
| | RHFPCGNVNYGYQQQGLPLEAATAPGAGHYEDTILKSKNSMNQPGP | |
| ALK- | MDSLPRLTSVLTLLFSGLWHLGLTATNYNCDDPLASLLSPMAFSSSSDLIGTHS | 55 |
| CNTNAP5 | PAQLNWRVVYRRKHQELQAMQMELQSPEYKLSKLRTSTIMTDYNPNYCFAGKTS | |
| | SISDLKEVPRKNITLIRGLGHGAFGEVYEGQVSGMPNDPSPLQVAVKTLPEVCS | |
| | EQDELDELMEALIISKENHQNIVRCIGVSLQSLPRFILLELMAGGDLKSFLRET | |
| | RPRPSQPSSLAMLDLLHVARDIACGCQYLEENHFIHRDIAARNCLLTCPGPGRV | |
| | AKIGDFGMARDIYRASYYRKGGCAMLPVKWMPPEAFMEGIFTSKTDTWSFGVLL | |
| | WEIFSLGYMPYPSKSNQEVLEFVTSGGRMDPPKNCPGPVYRIMTQCWQHQPEDR | |
| | PNFAIILERIEYCTQDPDVINTALPIEYGPLVEEEEKVPVRPKDPEGVPPLLVS | |
| | QQAKREEERSPAAPPPLPTTSSGKAAKKPTAAEISVRVPRGPAVEGGHVNMAFS | |
| | QSNPPSELHKVHGSRNKPTSLWNPTYGSWFTEKPTKKNNPIAKKEPHDRGNLGL | |
| | EGSCTVPPNVATGRLPGASLLLEPSSLTANMKEVPLFRLRHFPCGNVNYGYQQQ | |
| | GLPLEAATAPGAGHYEDTILKSKNSMNQPGP | |
| ALK- | MAARQAVGSGAQETCGLDRILEALKLLLSPGGHSSLESPTNMPSPSPDYFTWNL | 57 |
| TANGO6 | TWIMKDSFPFLSHRSRYGLECSFDFPCELEYSPPLHDLRNQSWSWRRIPSEEAS | |
| | QMDLLDGPGAERSKEMPRGSFLLLNTSADSKHTILSPWMRSSSEHCTLAVSVHR | |
| | HLQPSGRYIAQLLPHNEAAREILLMPTPGKHGWTVLQGRIGRPDNPFRVALEYI | |
| | SSGNRSLSAVDFFALKNCSEGTSPGSKMALQSSFTCWNGTVLQLGQACDFHQDC | |
| | AQGEDESQMCRKLPVGFYCNFEDGFCGWTQGTLSPHTPQWQVRTLKDARFQDHQ | |
| | DHALLLSTTDVPASESATVISATFPAPIKSSPCELRMSWLIRGVLRGNVSLVLV | |
| | ENKTGKEQGRMVWHVAAYEGLSLWQWMVLPLLDVSDREWLQMVAWWGQGSRAIV | |
| | AFDNISISLDCYLTISGEDKILQNTAPKSRNLFERNPNKELKPGENSPRQTPIF | |
| | DPTVHWLFTTCGASGPHGPTQAQCNNAYQNSNLSVEVGSEGPLKGIQIWKVPAT | |
| | DTYSISGYGAAGGKGGKNTMMRSHGVSVLGIFNLEKDDMLYILVGQQGEDACPS | |
| | TNQLIQKVCIGENNVIEEEIRVNRSVHEWAGGGGGGGGATYVFKMKDGVPVPLI | |
| | IAAGGGGRAYGAKTDTFHPERLENNSSVLGLNGNSGAAGGGGGWNDNTSLLWAG | |
| | KSLQEGATGGHSCPQAMKKWGWETRGGFGGGGGGCSSGGGGGGYIGGNAASNND | |
| | PEMDGEDGVSFISPLGILYTPALKVMEGHGEVNIKHYLNCSHCEVDECHMDPES | |
| | HKVICFCDHGTVLAEDGVSCIVSPTPEPHLPLSLILSVVTSALVAALVLAFSGI | |
| | MIVYRRKHQELQAMQMELQSPEYKLSKLRTSTIMTDYNPNYCFAGKTSSISDLK | |
| | EVPRKNITLIRGLGHGAFGEVYEGQVSGMPNDPSPLQVAVKTLPEVCSEQDELD | |
| | FLMEALIISKENHQNIVRCIGVSLQSLPRFILLELMAGGDLKSFLRETRPRPSQ | |
| | PSSLAMLDLLHVARDIACGCQYLEENHFIHRDIAARNCLLTCPGPGRVAKIGDF | |
| | GMARDIYRASYYRKGGCAMLPVKWMPPEAFMEGIFTSKTDTWSFGVLLWEIFSL | |
| | GYMPYPSKSNQEVLEFVTSGGRMDPPKNCPGPVYRIMTQCWQHQPEDRPNFAII | |
| | LERIEYCTQDPDVINTALPIEYGPLVEEEEKVPVRPKDPEGVPPLLVSQQAKRE | |
| | EERSPAAPPPLPTTSSGKAAKKPTAAEISVRVPRGPAVEGGHVNMAFSQSNPPS | |
| | ELHKVHGSRNKPTSLWNPTYGSWFTEKPTKKNNPIAKKEPHDRGNLGLEGSCTV | |
| | PPNVATGRLPGASLLLEPSSLTANMKEVPLFRLRHFPCGNVNYGYQQQGLPLEA | |
| | ATAPGAGHYEDTILKSKNSMNQPGP | |
| ALK-NFIA | MYSPLCLTQDEFHPFIEALLPHVRAFAYTWFNLQARKRKYFKKHEKRMSKEEER | 58 |
| | AVKDELLSEKPEVKQKWASRLLAKLRKDIRPEYREDFVLTVTGKKPPCCVLSNP | |
| | DQKGKMRRIDCLRQADKVWRLDLVMVILFKGIPLESTDGERLVKSPQCSNPGLC | |
| | VQPHHIGVSVKELDLYLAYFVHAAGHSSLESPTNMPSPSPDYFTWNLTWIMKDS | |
| | FPFLSHRSRYGLECSFDFPCELEYSPPLHDLRNQSWSWRRIPSEEASQMDLLDG | |
| | PGAERSKEMPRGSFLLLNTSADSKHTILSPWMRSSSEHCTLAVSVHRHLQPSGR | |
| | YIAQLLPHNEAAREILLMPTPGKHGWTVLQGRIGRPDNPFRVALEYISSGNRSL | |
| | SAVDFFALKNCSEGTSPGSKMALQSSFTCWNGTVLQLGQACDFHQDCAQGEDES | |
| | QMCRKLPVGFYCNFEDGFCGWTQGTLSPHTPQWQVRTLKDARFQDHQDHALLLS | |
| | TTDVPASESATVISATFPAPIKSSPCELRMSWLIRGVLRGNVSLVLVENKTGKE | |
| | QGRMVWHVAAYEGLSLWQWMVLPLLDVSDREWLQMVAWWGQGSRAIVAFDNISI | |
| | SLDCYLTISGEDKILQNTAPKSRNLFERNPNKELKPGENSPRQTPIFDPTVHWL | |
| | FTTCGASGPHGPTQAQCNNAYQNSNLSVEVGSEGPLKGIQIWKVPATDTYSISG | |
| | YGAAGGKGGKNTMMRSHGVSVLGIFNLEKDDMLYILVGQQGEDACPSTNQLIQK | |
| | VCIGENNVIEEEIRVNRSVHEWAGGGGGGGGATYVFKMKDGVPVPLIIAAGGGG | |
| | RAYGAKTDTFHPERLENNSSVLGLNGNSGAAGGGGGWNDNTSLLWAGKSLQEGA | |
| | TGGHSCPQAMKKWGWETRGGFGGGGGGCSSGGGGGGYIGGNAASNNDPEMDGED | |
| | GVSFISPLGILYTPALKVMEGHGEVNIKHYLNCSHCEVDECHMDPESHKVICFC | |
| | DHGTVLAEDGVSCIVSPTPEPHLPLSLILSVVTSALVAALVLAFSGIMIVYRRK | |
| | HQELQAMQMELQSPEYKLSKLRISTIMTDYNPNYCFAGKTSSISDLKEVPRKNI | |
| | TLIRGLGHGAFGEVYEGQVSGMPNDPSPLQVAVKTLPEVCSEQDELDELMEALI | |
| | ISKFNHQNIVRCIGVSLQSLPRFILLELMAGGDLKSFLRETRPRPSQPSSLAML | |
| | DLLHVARDIACGCQYLEENHFIHRDIAARNCLLTCPGPGRVAKIGDFGMARDIY | |
| | RASYYRKGGCAMLPVKWMPPEAFMEGIFTSKTDTWSFGVLLWEIFSLGYMPYPS | |
| | KSNQEVLEFVTSGGRMDPPKNCPGPVYRIMTQCWQHQPEDRPNFAIILERIEYC | |
| | TQDPDVINTALPIEYGPLVEEEEKVPVRPKDPEGVPPLLVSQQAKREEERSPAA | |
| | PPPLPTTSSGKAAKKPTAAEISVRVPRGPAVEGGHVNMAFSQSNPPSELHKVHG | |
| | SRNKPTSLWNPTYGSWFTEKPTKKNNPIAKKEPHDRGNLGLEGSCTVPPNVATG | |
| | RLPGASLLLEPSSLTANMKEVPLFRLRHFPCGNVNYGYQQQGLPLEAATAPGAG | |
| | HYEDTILKSKNSMNQPGP | |
| ALK- | MEEEGGSSGGAAGTSADGGDGGEQLLTVKHELRTDHALLLSTTDVPASESATVT | 59 |
| RPS6KA5 | SATFPAPIKSSPCELRMSWLIRGVLRGNVSLVLVENKTGKEQGRMVWHVAAYEG | |
| | LSLWQWMVLPLLDVSDREWLQMVAWWGQGSRAIVAFDNISISLDCYLTISGEDK | |
| | ILQNTAPKSRNLFERNPNKELKPGENSPRQTPIFDPTVHWLFTTCGASGPHGPT | |
| | QAQCNNAYQNSNLSVEVGSEGPLKGIQIWKVPATDTYSISGYGAAGGKGGKNTM | |
| | MRSHGVSVLGIFNLEKDDMLYILVGQQGEDACPSTNQLIQKVCIGENNVIEEEI | |
| | RVNRSVHEWAGGGGGGGGATYVFKMKDGVPVPLIIAAGGGGRAYGAKTDTFHPE | |
| | RLENNSSVLGLNGNSGAAGGGGGWNDNTSLLWAGKSLQEGATGGHSCPQAMKKW | |
| | GWETRGGFGGGGGGCSSGGGGGGYIGGNAASNNDPEMDGEDGVSFISPLGILYT | |
| | PALKVMEGHGEVNIKHYLNCSHCEVDECHMDPESHKVICFCDHGTVLAEDGVSC | |
| | IVSPTPEPHLPLSLILSVVTSALVAALVLAFSGIMIVYRRKHQELQAMQMELQS | |
| | PEYKLSKLRTSTIMTDYNPNYCFAGKTSSISDLKEVPRKNITLIRGLGHGAFGE | |
| | VYEGQVSGMPNDPSPLQVAVKTLPEVCSEQDELDELMEALIISKENHQNIVRCI | |
| | GVSLQSLPRFILLELMAGGDLKSFLRETRPRPSQPSSLAMLDLLHVARDIACGC | |
| | QYLEENHFIHRDIAARNCLLTCPGPGRVAKIGDFGMARDIYRASYYRKGGCAML | |
| | PVKWMPPEAFMEGIFTSKTDTWSFGVLLWEIFSLGYMPYPSKSNQEVLEFVTSG | |
| | GRMDPPKNCPGPVYRIMTQCWQHQPEDRPNFAIILERIEYCTQDPDVINTALPI | |
| | EYGPLVEEEEKVPVRPKDPEGVPPLLVSQQAKREEERSPAAPPPLPTTSSGKAA | |
| | KKPTAAEISVRVPRGPAVEGGHVNMAFSQSNPPSELHKVHGSRNKPTSLWNPTY | |
| | GSWFTEKPTKKNNPIAKKEPHDRGNLGLEGSCTVPPNVATGRLPGASLLLEPSS | |
| | LTANMKEVPLFRLRHFPCGNVNYGYQQQGLPLEAATAPGAGHYEDTILKSKNSM | |
| | NQPGP | |
| ALK-TG | MALVLEIFTLLASICWVSANIFEYQVDAQPLRPCELQRETAFLKQADYVPQCAE | 60 |
| | DGSFQTVQCQNDGRSCWCVGANGSEVLGSRQPGRPVACLSFCQLQKQQILLSGY | |
| | INSTDTSYLPQCQDSGDYAPVQCDVQQVQCWCVDAEGMEVYGTRQLGRPKRCPR | |
| | SCEIRNRRLLHGVGDKSPPQCSAEGEFMPVQCKFVNTTDMMIFDLVHSYNRFPD | |
| | AFVTFSSFQRRFPEVSGYCHCADSQGRELAETGLELLLDEIYDTIFAGLDLPST | |
| | FTETTLYRILQRRFLAVQSVISGRFRCPTKCEVERFTATSFGHPYVPSCRRNGD | |
| | YQAVQCQTEGPCWCVDAQGKEMHGTRQQGEPPSCAEGQSCASERQQALSRLYFG | |
| | TSGYFSQHDLFSSPEKRWASPRVARFATSCPPTIKELFVDSGLLRPMVEGQSQQ | |
| | FSVSENLLKEAIRAIFPSRGLARLALQFTTNPKRLQQNLEGGKFLVNVGQFNLS | |
| | GALGTRGTFNFSQFFQQLGLASFLNGGRQEDLAKPLSVGLDSNSSTGTPEAAKK | |
| | DGTMNKPTVGSFGFEINLQENQNALKFLASLLELPEFLLFLQHAISVPEDVARD | |
| | LGDVMETVLSSQTCEQTPERLFVPSCTTEGSYEDVQCFSGECWCVNSWGKELPG | |
| | SRVRGGQPRCPTDCEKQRARMQSLMGSQPAGSTLFVPACTSEGHELPVQCENSE | |
| | CYCVDAEGQAIPGTRSAIGKPKKCPTPCQLQSEQAFLRTVQALLSNSSMLPTLS | |
| | DTYIPQCSTDGQWRQVQCNGPPEQVFELYQRWEAQNKGQDLTPAKLLVKIMSYR | |
| | EAASGNFSLFIQSLYEAGQQDVFPVLSQYPSLQDVPLAALEGKRPQPRENILLE | |
| | PYLFWQILNGQLSQYPGSYSDFSTPLAHFDLRNCWCVDEAGQELEGMRSEPSKL | |
| | PTLSPTPEPHLPLSLILSVVTSALVAALVLAFSGIMIVYRRKHQELQAMQMELQ | |
| | SPEYKLSKLRTSTIMTDYNPNYCFAGKTSSISDLKEVPRKNITLIRGLGHGAFG | |
| | EVYEGQVSGMPNDPSPLQVAVKTLPEVCSEQDELDELMEALIISKENHQNIVRC | |
| | IGVSLQSLPRFILLELMAGGDLKSFLRETRPRPSQPSSLAMLDLLHVARDIACG | |
| | CQYLEENHFIHRDIAARNCLLTCPGPGRVAKIGDFGMARDIYRASYYRKGGCAM | |
| | LPVKWMPPEAFMEGIFTSKTDTWSFGVLLWEIFSLGYMPYPSKSNQEVLEFVTS | |
| | GGRMDPPKNCPGPVYRIMTQCWQHQPEDRPNFAIILERIEYCTQDPDVINTALP | |
| | IEYGPLVEEEEKVPVRPKDPEGVPPLLVSQQAKREEERSPAAPPPLPTTSSGKA | |
| | AKKPTAAEISVRVPRGPAVEGGHVNMAFSQSNPPSELHKVHGSRNKPTSLWNPT | |
| | YGSWFTEKPTKKNNPIAKKEPHDRGNLGLEGSCTVPPNVATGRLPGASLLLEPS | |
| | SLTANMKEVPLFRLRHFPCGNVNYGYQQQGLPLEAATAPGAGHYEDTILKSKNS | |
| | MNQPGP | |
| ALK- | MGTPASGRKRTPVKDRFSAEDEALSNIAREAEARLAAKRAARAEARDIRMRELE | 61 |
| LRRFIP2 | RQQKEYSLHSFDRKWGQIQKWLEDSERARYSHRSSHHRPYLGVEDALSIRSVGS | |
| | HRYDMFKDRSSRLSSLNHSYSHSHGMKKRSSDSHKDLLSGLYFDQRNYSSLRHS | |
| | KPTSAYYTRQSSSLYSDPLATYKSDRASPTANSGLLRSASLASLYNGGLYNPYG | |
| | PRTPSECSYYSSRISSARSSPGFTNDDTASIVSSDRASRGRRESVVSAADYFSR | |
| | SNRRGSVVSEVDDISIPDLSSLDEKSDKQYAENYTRPSSRNSASATTPLSGNSS | |
| | RRGSGDTSSLIDPDTSLSELRDIYDLKDQIQDVEGRYMQGLKELKESLSEVEEK | |
| | YKKAMVSNAQLDNEKNNLIYQVDTLKDVIEEQEEQMAEFYRENEEKSKELERQK | |
| | HMCSVLQHKMEELKEGLRQRDELIEEKQRMQQKIDTMTKEVEDLQETLLWKDKK | |
| | IGALEKQKEYIACLRNERDMLREELADLQETVKTGEKHGLVIIPDGTPNGDVSH | |
| | EPVAGAITVVSQEAAQVLESAGEGPLDVRLRKLAGEKEELLSQIRKLKLQLEEE | |
| | RQKCSRNDGTVGDLAGLQNGSDLQFIEMQMYRRKHQELQAMQMELQSPEYKLSK | |
| | LRTSTIMTDYNPNYCFAGKTSSISDLKEVPRKNITLIRGLGHGAFGEVYEGQVS | |
| | GMPNDPSPLQVAVKTLPEVCSEQDELDELMEALIISKENHQNIVRCIGVSLQSL | |
| | PRFILLELMAGGDLKSFLRETRPRPSQPSSLAMLDLLHVARDIACGCQYLEENH | |
| | FIHRDIAARNCLLTCPGPGRVAKIGDFGMARDIYRASYYRKGGCAMLPVKWMPP | |
| | EAFMEGIFTSKTDTWSFGVLLWEIFSLGYMPYPSKSNQEVLEFVTSGGRMDPPK | |
| | NCPGPVYRIMTQCWQHQPEDRPNFAIILERIEYCTQDPDVINTALPIEYGPLVE | |
| | EEEKVPVRPKDPEGVPPLLVSQQAKREEERSPAAPPPLPTTSSGKAAKKPTAAE | |
| | ISVRVPRGPAVEGGHVNMAFSQSNPPSELHKVHGSRNKPTSLWNPTYGSWFTEK | |
| | PTKKNNPIAKKEPHDRGNLGLEGSCTVPPNVATGRLPGASLLLEPSSLTANMKE | |
| | VPLFRLRHFPCGNVNYGYQQQGLPLEAATAPGAGHYEDTILKSKNSMNQPGP | |
| ALK- | MAVAELYTQYNRVWIPDPEEVWKSAEIAKDYRVGDKVLRLLLEDGTELDYSVNP | 62 |
| MYO5C | ESLPPLRNPDILVGENDLTALSYLHEPAVLHNLRIRFAESKLIYTYSGIILVAM | |
| | NPYKQLPIYGDAIIHAYSGQNMGDMDPHIFAVAEEAYKQMARNNRNQSIIVSGE | |
| | SGAGKTVSARYAMRYFATVSKSGSNAHVEDKVLASNPITEAVGNAKTTRNDNSS | |
| | RFGKYTEISFDEQNQIIGANMSTYLLEKSRVVFQSENERNYHIFYQLCASAQQS | |
| | EFKHLKLGSAEEFNYTRMGGNTVIEGVNDRAEMVETQKTFTLLGFKEDFQMDVF | |
| | KILAAILHLGNVQITAVGNERSSVSEDDSHLKVFCELLGLESGRVAQWLCNRKI | |
| | VTSSETVVKPMTRPQAVNARDALAKKIYAHLFDFIVERINQALQFSGKQHTFIG | |
| | VLDIYGFETFDVNSFEQFCINYANEKLQQQFNMHVFKLEQEEYMKEDIPWTLID | |
| | FYDNQPVIDLIEAKMGILELLDEECLLPHGTDENWLQKLYNNFVNRNPLFEKPR | |
| | MSNTSFVIQHFADKVEYKCEGFLEKNRDTVYDMLVEILRASKFHLCANFFQENP | |
| | TPPSPFGSMITVKSAKQVIKPNSKHFRTTVGSKFRSSLYLLMETLNATTPHYVR | |
| | CIKPNDEKLPFEFDSKRIVQQLRACGVLETIRISAQSYPSRWTYIEFYSRYGIL | |
| | MTKQELSFSDKKEVCKVVLHRLIQDSNQYQFGKTKIFFRAGQVAYLEKLRLDKL | |
| | RQSCVMVQKHMRGWLQRKKFLRERRAALIIQQYFRGQQTVRKAITAVALKEAWA | |
| | AIIIQKHCRGYLVRSLYQLIRMATITMQAYSRGFLARRRYRKMLEEHKAVILQK | |
| | YARAWLARRRFQSIRRFVLNIQLTYRVQRLQKKLEDQNKENHGLVEKLTSLAAL | |
| | RAGDVEKIQKLEAELEKAATHRRNYEEKGKRYRDAVEEKLAKLQKHNSELETQK | |
| | EQIQLKLQEKTEELKEKMDNLTKQLFDDVQKEERQRMLLEKSFELKTQDYEKQI | |
| | QSLKEEIKALKDEKMQLQHLVEGEHVTSDGLKAEVARLSKQVKTISEFEKEIEL | |
| | LQAQKIDVEKHVQSQKREMREKMSEITKQLLESYDIEDVRSRLSVEDLEHLNED | |
| | GELWFAYEGLKKATRVLESHFQSQKDCYEKEIEALNFKVVHLSQEINHLQKLER | |
| | EENDINESIRHEVTRLTSENMMIPDFKQQISELEKQKQDLEIRLNEQAEKMKVY | |
| | RRKHQELQAMQMELQSPEYKLSKLRTSTIMTDYNPNYCFAGKTSSISDLKEVPR | |
| | KNITLIRGLGHGAFGEVYEGQVSGMPNDPSPLQVAVKTLPEVCSEQDELDFLME | |
| | ALIISKFNHQNIVRCIGVSLQSLPRFILLELMAGGDLKSFLRETRPRPSQPSSL | |
| | AMLDLLHVARDIACGCQYLEENHFIHRDIAARNCLLTCPGPGRVAKIGDFGMAR | |
| | DIYRASYYRKGGCAMLPVKWMPPEAFMEGIFTSKTDTWSFGVLLWEIFSLGYMP | |
| | YPSKSNQEVLEFVTSGGRMDPPKNCPGPVYRIMTQCWQHQPEDRPNFAIILERI | |
| | EYCTQDPDVINTALPIEYGPLVEEEEKVPVRPKDPEGVPPLLVSQQAKREEERS | |
| | PAAPPPLPTTSSGKAAKKPTAAEISVRVPRGPAVEGGHVNMAFSQSNPPSELHK | |
| | VHGSRNKPTSLWNPTYGSWFTEKPTKKNNPIAKKEPHDRGNLGLEGSCTVPPNV | |
| | ATGRLPGASLLLEPSSLTANMKEVPLFRLRHFPCGNVNYGYQQQGLPLEAATAP | |
| | GAGHYEDTILKSKNSMNQPGP | |
| ALK- | MNYQQQLANSAAIRAEIQRFESVHPNIYSIYELLERVEEPVLQNQIREHVIAIE | 63 |
| AGAP1 | DAFVNSQEWTLSRSVPELKVGIVGNLASGKSALVHRYLTGTYVQEESPEGGRFK | |
| | KEIVVDGQSYLLLIRDEGGPPEAQFAMWVDAVIFVFSLEDEISFQTVYHYYSRM | |
| | ANYRNTSEIPLVLVGTQDAISSANPRVIDDARARKLSNDLKRCTYYETCATYGL | |
| | NVERVFQDVMEGHGEVNIKHYLNCSHCEVDECHMDPESHKVICFCDHGTVLAED | |
| | GVSCIVSPTPEPHLPLSLILSVVTSALVAALVLAFSGIMIVYRRKHQELQAMQM | |
| | ELQSPEYKLSKLRISTIMTDYNPNYCFAGKTSSISDLKEVPRKNITLIRGLGHG | |
| | AFGEVYEGQVSGMPNDPSPLQVAVKTLPEVCSEQDELDELMEALIISKENHQNI | |
| | VRCIGVSLQSLPRFILLELMAGGDLKSFLRETRPRPSQPSSLAMLDLLHVARDI | |
| | ACGCQYLEENHFIHRDIAARNCLLTCPGPGRVAKIGDFGMARDIYRASYYRKGG | |
| | CAMLPVKWMPPEAFMEGIFTSKIDTWSFGVLLWEIFSLGYMPYPSKSNQEVLEF | |
| | VTSGGRMDPPKNCPGPVYRIMTQCWQHQPEDRPNFAIILERIEYCTQDPDVINT | |
| | ALPIEYGPLVEEEEKVPVRPKDPEGVPPLLVSQQAKREEERSPAAPPPLPTTSS | |
| | GKAAKKPTAAEISVRVPRGPAVEGGHVNMAFSQSNPPSELHKVHGSRNKPTSLW | |
| | NPTYGSWFTEKPTKKNNPIAKKEPHDRGNLGLEGSCTVPPNVATGRLPGASLLL | |
| | EPSSLTANMKEVPLFRLRHFPCGNVNYGYQQQGLPLEAATAPGAGHYEDTILKS | |
| | KNSMNQPGP | |
| ALK- | MGAIGLLWLLPLLLSTAAVGSGMGTGQRAGSPAAGPPLQPREPLSYSRLQRKSL | 64 |
| MED13L | AVDFVVPSLFRVYARDLLLPPSSSELKAGRPEARGSLALDCAPLLRLLGPAPGV | |
| | SWTAGSPAPAEARTLSRVLKGGSVRKLRRAKQLVLELGEEAILEGCVGPPGEAA | |
| | VGLLQFNLSELFSWWIRQGEGRLRIRLMPEKKASEVGREGRLSAAIRASQPRLL | |
| | FQIFGTVLVSPYGLNGTLTGQAYKMSDPATRKLIEEWQYFYPMVLKKKEESKEE | |
| | DELGYDDDFPVAVEVIVGGVRMVYPSAFVLISQNDIPVPQSVASAGGHIAVGQQ | |
| | GLGSVKDPSNCGMPLTPPTSPEQAILGESGGMQSAASHLVSQDGGMITMHSPKR | |
| | SGKIPPKLHNHMVHRVWKECILNRTQSKRSQMSTPTLEEEPASNPATWDFVDPT | |
| | QRVSCSCSRHKLLKRCAVGPNRPPTVSQPGFSAGPSSSSSLPPPASSKHKTAER | |
| | QEKGDKLQKRPLIPFHHRPSVAEELCMEQDTPGQKLGLAGIDSSLEVSSSRKYD | |
| | KQMAVPSRNTSKQMNLNPMDSPHSPISPLPPTLSPQPRGQETESLDPPSVPVNP | |
| | ALYGNGLELQQLSTLDDRTVLVGQRLPLMAEVSETALYCGIRPSNPESSEKWWH | |
| | SYRLPPSDDAEFRPPELQGERCDAKMEVNSESTALQRLLAQPNKRFKIWQDKQP | |
| | QLQPLHFLDPLPLSQQPGDSLGEVNDPYTFEDGDIKYIFTANKKCKQGTEKDSL | |
| | KKNKSEDGFGTKDVTTPGHSTPVPDGKNAMSIFSSATKTDVRQDNAAGRAGSSS | |
| | LTQVTDLAPSLHDLDNIFDNSDDDELGAVSPALRSSKMPAVGTEDRPLGKDGRA | |
| | AVPYPPTVADLQRMFPTPPSLEQHPAFSPVMNYKDGISSETVTALGMMESPMVS | |
| | MVSTQLTEFKMEVEDGLGSPKPEEIKDESYVHKVPSFQPFVGSSMFAPLKMLPS | |
| | HCLLPLKIPDACLFRPSWAIPPKIEQLPMPPAATFIRDGYNNVPSVGSLADPDY | |
| | LNTPQMNTPVTLNSAAPASNSGAGVLPSPATPRFSVPTPRTPRTPRTPRGGGTA | |
| | SGQGSVKYDSTDQGSPASTPSTTRPLNSVEPATMQPIPEAHSLYVTLILSDSVM | |
| | NIFKDRNFDSCCICACNMNIKGADVGLYIPDSSNEDQYRCTCGFSAIMNRKLGY | |
| | NSGLFLEDELDIFGKNSDIGQAAERRLMMCQSTFLPQVEGTKKPQEPPISLLLL | |
| | LQNQHTQPFASLNFLDYISSNNRQTLPCVSWSYDRVQADNNDYWTECFNALEQG | |
| | RQYVDNPTGGKVDEALVRSATVHSWPHSNVLDISMLSSQDVVRMLLSLQPFLQD | |
| | AIQKKRTGRTWENIQHVQGPLTWQQFHKMAGRGTYGSEESPEPLPIPTLLVGYD | |
| | KDFLTISPFSLPFWERLLLDPYGGHRDVAYIVVCPENEALLEGAKTFFRDLSAV | |
| | YEMCRLGQHKPICKVLRDGIMRVGKTVAQKLTDELVSEWFNQPWSGEENDNHSR | |
| | LKLYAQVCRHHLAPYLATLQLDSSLLIPPKYQTPPAAAQGQATPGNAGPLAPNG | |
| | SAAPPAGSAFNPTSNSSSTNPAASSSASGSSVPPVSSSASAPGISQISTTSSSG | |
| | FSGSVGGQNPSTGGISADRTQGNIGCGGDTDPGQSSSQPSQDGQESVTERERIG | |
| | IPTEPDSADSHAHPPAVVIYMVDPFTYAAEEDSTSGNFWLLSLMRCYTEMLDNL | |
| | PEHMRNSFILQIVPCQYMLQTMKDEQVFYIQYLKSMAFSVYCQCRRPLPTQIHI | |
| | KSLTGFGPAASIEMTLKNPERPSPIQLYSPPFILAPIKDKQTELGETFGEASQK | |
| | YNVLFVGYCLSHDQRWLLASCTDLHGELLETCVVNIALPNRSRRSKVSARKIGL | |
| | QKLWEWCIGIVQMTSLPWRVVIGRLGRLGHGELKDWSILLGECSLQTISKKLKD | |
| | VCRMCGISAADSPSILSACLVAMEPQGSFVVMPDAVTMGSVFGRSTALNMQSSQ | |
| | LNTPQDASCTHILVFPTSSTIQVAPANYPNEDGESPNNDDMFVDLPFPDDMDND | |
| | IGILMTGNLHSSPNSSPVPSPGSPSGIGVGSHFQHSRSQGERLLSREAPEELKQ | |
| | QPLALGYFVSTAKAENLPQWFWSSCPQAQNQCPLFLKASLHHHISVAQTDELLP | |
| | ARNSQRVPHPLDSKTTSDVLRFVLEQYNALSWLTCNPATQDRTSCLPVHFVVLT | |
| | QLYNAIMNIL | |
| ALK- | MGAIGLLWLLPLLLSTAAVGSGMGTGQRAGSPAAGPPLQPREPLSYSRLQRKSL | 65 |
| MTBP | AVDFVVPSLFRVYARDLLLPPSSSELKAGRPEARGSLALDCAPLLRLLGPAPGV | |
| | SWTAGSPAPAEARTLSRVLKGGSVRKLRRAKQLVLELGEEAILEGCVGPPGEAA | |
| | VGLLQFNLSELFSWWIRQGEGRLRIRLMPEKKASEVGREGRLSAAIRASQPRLL | |
| | FQIFGTGHSSLESPTNMPSPSPDYFTWNLTWIMKDSFPFLSHRSRYGLECSFDF | |
| | PCELEYSPPLHDLRNQSWSWRRIPSEEASQMDLLDGPGAERSKEMPRGSFLLLN | |
| | TSADSKHTILSPWMRSSSEHCTLAVSVHRHLQPSGRYIAQLLPHNEAAREILLM | |
| | PTPGKHGWTVLQGRIGRPDNPFRVALEYISSGNRSLSAVDFFALKNCSEGTSPG | |
| | SKMALQSSFTCWNGTVLQLGQACDFHQDCAQGEDESQMCRKLPVGFYCNFEDGE | |
| | CGWTQGTLSPHTPQWQVRTLKDARFQDHQDHALLLSTTDVPASESATVTSATFP | |
| | APIKSSPCELRMSWLIRGVLRGNVSLVLVENKTGKEQGRMVWHVAAYEGLSLWQ | |
| | WMVLPLLDVSDREWLQMVAWWGQGSRAIVAFDNISISLDCYLTISGEDKILQNT | |
| | APKSRNLFERNPNKELKPGENSPRQTPIFDPTVHWLFTTCGASGPHGPTQAQCN | |
| | NAYQNSNLSVEVGSEGPLKGIQIWKVPATDTYSISGYGAAGGKGGKNTMMRSHG | |
| | VSVLGIFNLEKDDMLYILVGQQGEDACPSTNQLIQKVCIGENNVIEEEIRVNRS | |
| | VHEWAGGGGGGGGATYVFKMKDGVPVPLIIAAGGGGRAYGAKTDTFHPERLENN | |
| | SSVLGLNGNSGAAGGGGGWNDNTSLLWAGKSLQEGATGGHSCPQAMKKWGWETR | |
| | GGFGGGGGGCSSGGGGGGYIGGNAASNNDPEMDGEDGVSFISPLGILYTPALKV | |
| | PDVEVKGECSSYYLLLQGNGNRRCKATLIHSANQINGSFALNLIHGKMKTKTEE | |
| | AKLSFPFDLLSLPHFSGEQIVQREKQLANVQVLALEECLKRRKLAKQPETVSVA | |
| | ELKSLLVLTRKHFLDYFDAVIPKMILRKMDKIKTFNILNDFSPVEPNSSSLMET | |
| | NPLEWPERHVLQNLETFEKTKQKMRTGSLPHSSEQLLGHKEGPRDSITLLDAKE | |
| | LLKYFTSDGLPIGDLQPLPIQKGEKTFVLTPELSPGKLQVLPFEKASVCHYHGI | |
| | EYCLDDRKALERDGGFSELQSRLIRYETQTTCTRESFPVPTVLSPLPSPVVSSD | |
| | PGSVPDGEVLQNELRTEVSRLKRRSKDLNCLYPRKRLVKSESSESLLSQTTGNS | |
| | NHYHHHVTSRKPQTERSLPVTCPLVPIPSCETPKLATKTSSGQKSMHESKTSRQ | |
| | IKESRSQKHTRILKEVVTETLKKHSITETHECFTACSQRLFEISKFYLKDLKTS | |
| | RGLFEEMKKTANNNAVQVIDWVLEKTSKK | |
| ALK- | MGAIGLLWLLPLLLSTAAVGSGMGTGQRAGSPAAGPPLQPREPLSYSRLQRKSL | 67 |
| SLC30A6 | AVDFVVPSLFRVYARDLLLPPSSSELKAGRPEARGSLALDCAPLLRLLGPAPGV | |
| | SWTAGSPAPAEARTLSRVLKGGSVRKLRRAKQLVLELGEEAILEGCVGPPGEAA | |
| | VGLLQFNLSELFSWWIRQGEGRLRIRLMPEKKASEVGREGRLSAAIRASQPRLL | |
| | FQIFGTGHSSLESPTNMPSPSPDYFTWNLTWIMKDSFPFLSHRSRYGLECSFDF | |
| | PCELEYSPPLHDLRNQSWSWRRIPSEEASQMDLLDGPGAERSKEMPRGSFLLLN | |
| | TSADSKHTILSPWMRSSSEHCTLAVSVHRHLQPSGRYIAQLLPHNEAAREILLM | |
| | PTPGKHGWTVLQGRIGRPDNPFRVALEYISSGNRSLSAVDFFALKNCSEGTSPG | |
| | SKMALQSSFTCWNGTVLQLGQACDFHQDCAQGEDESQMCRKLPVGFYCNFEDGE | |
| | CGWTQGTLSPHTPQWQVRTLKDARFQDHQDHALLLSTTDVPASESATVTSATFP | |
| | APIKSSPCELRMSWLIRGVLRGNVSLVLVENKTGKEQGRMVWHVAAYEGLSLWQ | |
| | WMVLPLLDVSDREWLQMVAWWGQGSRAIVAFDNISISLDCYLTISGEDKILQNT | |
| | APKSRNLFERNPNKELKPGENSPRQTPIFDPTVHWLFTTCGASGPHGPTQAQCN | |
| | NAYQNSNLSVEVGSEGPLKGIQIWKVPATDTYSISGYGAAGGKGGKNTMMRSHG | |
| | VSVLGIFNLEKDDMLYILVGQQGEDACPSTNQLIQKVCIGENNVIEEEIRVNRS | |
| | VHEWAGGGGGGGGATYVFKMKDGVPVPLIIAAGGGGRAYGAKTDTFHPERLENN | |
| | SSVLGLNGNSGAAGGGGGWNDNTSLLWAGKSLQEGATGGHSCPQAMKKWGWETR | |
| | GGFGGGGGGCSSGGGGGGYIGGNAASNNDPEMDGEDGVSFISPLGILYTPALKV | |
| | MEGHGEVNIKHYLNCSHCEVDECHMDPESHKVICFCDHGTVLAEDGVSCIALTA | |
| | YTYLTIFDLFSLMTCLISYWVTLRKPSPVYSFGFERLEVLAVFASTVLAQLGAL | |
| | FILKESAERFLEQPEIHTGRLLVGTFVALCENLFTMLSIRNKPFAYVSEAASTS | |
| | WLQEHVADLSRSLCGIIPGLSSIFLPRMNPFVLIDLAGAFALCITYMLIEINNY | |
| | FAVDTASAIAIALMTFGTMYPMSVYSGKVLLQTTPPHVIGQLDKLIREVSTLDG | |
| | VLEVRNEHFWTLGFGSLAGSVHVRIRRDANEQMVLAHVTNRLYTLVSTLTVQIF | |
| | KDDWIRPALLSGPVAANVLNFSDHHVIPMPLLKGTDDLNPVTSTPAKPSSPPPE | |
| | FSFNTPGKNVNPVILLNTQTRPYGFGLNHGHTPYSSMLNQGLGVPGIGATQGLR | |
| | TGFTNIPSRYGTNNRIGQPRP | |
| ALK- | MGAIGLLWLLPLLLSTAAVGSGMGTGQRAGSPAAGPPLQPREPLSYSRLQRKSL | 68 |
| GMCL1 | AVDFVVPSLFRVYARDLLLPPSSSELKAGRPEARGSLALDCAPLLRLLGPAPGV | |
| | SWTAGSPAPAEARTLSRVLKGGSVRKLRRAKQLVLELGEEAILEGCVGPPGEAA | |
| | VGLLQFNLSELFSWWIRQGEGRLRIRLMPEKKASEVGREGRLSAAIRASQPRLL | |
| | FQIFGTGHSSLESPTNMPSPSPDYFTWNLTWIMKDSFPFLSHRSRYGLECSEDE | |
| | PCELEYSPPLHDLRNQSWSWRRIPSEEASQMDLLDGPGAERSKEMPRGSFLLLN | |
| | TSADSKHTILSPWMRSSSEHCTLAVSVHRHLQPSGRYIAQLLPHNEAAREILLM | |
| | PTPGKHGWTVLQGRIGRPDNPERVALEYISSGNRSLSAVDFFALKNCSEGTSPG | |
| | SKMALQSSFTCWNGTVLQLGQACDFHQDCAQGEDESQMCRKLPVGFYCNFEDGE | |
| | CGWTQGTLSPHTPQWQVRTLKDARFQDHQDHALLLSTTDVPASESATVTSATFP | |
| | APIKSSPCELRMSWLIRGVLRGNVSLVLVENKTGKEQGRMVWHVAAYEGLSLWQ | |
| | WMVLPLLDVSDREWLQMVAWWGQGSRAIVAFDNISISLDCYLTISGEDKILQNT | |
| | APKSRNLFERNPNKELKPGENSPRQTPIFDPTVHWLFTTCGASGPHGPTQAQCN | |
| | NAYQNSNLSVEVGSEGPLKGIQIWKVPATDTYSISGYGAAGGKGGKNTMMRSHG | |
| | VSVLGIFNLEKDDMLYILVGQQGEDACPSTNQLIQKVCIGENNVIEEEIRVNRS | |
| | VHEWAGGGGGGGGATYVFKMKDGVPVPLIIAAGGGGRAYGAKTDTFHPERLENN | |
| | SSVLGLNGNSGAAGGGGGWNDNTSLLWAGKSLQEGATGGHSCPQAMKKWGWETR | |
| | GGFGGGGGGCSSGGGGGGYIGGNAASNNDPEMDGEDGVSFISPLGILYTPALKV | |
| | MEGHGEVNIKHYLNCSHCEVDECHMDPESHKVICFCDHGTVLAEDGVSCIVSPT | |
| | PEPHLPLSLILSVVTSALVAALVLAFSGIMIVYRRKHQELQAMQMELQSPEYKL | |
| | SKLRTSTIMTDYNPNYCFAGKTSSISDLKEVPRKNITLIRGLGHGAFGEVYEGQ | |
| | VSGMPNDPSPLQVAVKTLPEVCSEQDELDELMEALIISKENHQNIVRCIGVSLQ | |
| | SLPRFILLELMAGGDLKSFLRETRPRPSQPSSLAMLDLLHVARDIACGCQYLEE | |
| | NHFIHRDIAARNCLLTCPGPGRVAKIGDFGMARDIYRASYYRKGGCAMLPVKWM | |
| | PPEAFMEGIFTSKTDTWSFGVLLWEIFSLGYMPYPSKSNQEVLEFVTSGGRMDP | |
| | PKNCPGPVINVMKQLIGSSNLFVMQVEMDIYTALKKWMFLQLVPSWNGSLKQLL | |
| | TETDVWFSKQRKDFEGMAFLETEQGKPFVSVFRHLRLQYIISDLASARIIEQDA | |
| | VVPSEWLSSVYKQQWFAMLRAEQDSEVGPQEINKEELEGNSMRCGRKLAKDGEY | |
| | CWRWTGFNFGFDLLVTYTNRYIIFKRNTLNQPCSGSVSLQPRRSIAFRLRLASF | |
| | DSSGKLICSRTTGYQILTLEKDQEQVVMNLDSRLLIFPLYICCNFLYISPEKKN | |
| ALK- | MGAIGLLWLLPLLLSTAAVGSGMGTGQRAGSPAAGPPLQPREPLSYSRLQRKSL | 69 |
| AGAP1 | AVDFVVPSLFRVYARDLLLPPSSSELKAGRPEARGSLALDCAPLLRLLGPAPGV | |
| | SWTAGSPAPAEARTLSRVLKGGSVRKLRRAKQLVLELGEEAILEGCVGPPGEAA | |
| | VGLLQFNLSELFSWWIRQGEGRLRIRLMPEKKASEVGREGRLSAAIRASQPRLL | |
| | FQIFGTGHSSLESPTNMPSPSPDYFTWNLTWIMKDSFPFLSHRSRYGLECSFDF | |
| | PCELEYSPPLHDLRNQSWSWRRIPSEEASQMDLLDGPGAERSKEMPRGSFLLLN | |
| | TSADSKHTILSPWMRSSSEHCTLAVSVHRHLQPSGRYIAQLLPHNEAAREILLM | |
| | PTPGKHGWTVLQGRIGRPDNPFRVALEYISSGNRSLSAVDFFALKNCSEGTSPG | |
| | SKMALQSSFTCWNGTVLQLGQACDFHQDCAQGEDESQMCRKLPVGFYCNFEDGE | |
| | CGWTQGTLSPHTPQWQVRTLKDARFQDHQDHALLLSTTDVPASESATVTSATFP | |
| | APIKSSPCELRMSWLIRGVLRGNVSLVLVENKTGKEQGRMVWHVAAYEGLSLWQ | |
| | WMVLPLLDVSDREWLQMVAWWGQGSRAIVAFDNISISLDCYLTISGEDKILQNT | |
| | APKSRNLFERNPNKELKPGENSPRQTPIFDPTVHWLFTTCGASGPHGPTQAQCN | |
| | NAYQNSNLSVEVGSEGPLKGIQIWKVPATDTYSISGYGAAGGKGGKNTMMRSHG | |
| | VSVLGIFNLEKDDMLYILVGQQGEDACPSTNQLIQKVCIGENNVIEEEIRVNRS | |
| | VHEWAGGGGGGGGATYVFKMKDGVPVPLIIAAGGGGRAYGAKTDTFHPERLENN | |
| | SSVLGLNGNSGAAGGGGGWNDNTSLLWAGKSLQEGATGGHSCPQAMKKWGWETR | |
| | GGFGGGGGGCSSGGGGGGYIGGNAASNNDPEMDGEDGVSFISPLGILYTPALKV | |
| | MEGHGEVNIKHYLNCSHCEVDECHMDPESHKVICFCDHGTVLAEDGVSCIVSPT | |
| | PEPHLPLSLILSVVTSALVAALVLAFSGIMIVAQKIVATRKKQQLSIGPCKSLP | |
| | NSPSHSSVCSAQVSAVHISQTSNGGGSLSDYSSSVPSTPSTSQKELRIDVPPTA | |
| | NTPTPVRKQSKRRSNLFTSRKGSDPDKEKKGLESRADSIGSGRAIPIKQGMLLK | |
| | RSGKSLNKEWKKKYVTLCDNGVLTYHPSLHDYMQNVHGKEIDLLRTTVKVPGKR | |
| | PPRATSACAPISSPKINGLSKDMSSLHISPNSDTGLGDSVCSSPSISSTTSPKL | |
| | DPPPSPHANRKKHRRKKSTSNFKADGLSGTAEEQEENFEFIIVSLTGQTWHFEA | |
| | TTYEERDAWVQAIESQILASLQSCESSKNKSRLTSQSEAMALQSIRNMRGNSHC | |
| | VDCETQNPNWASLNLGALMCIECSGIHRNLGTHLSRVRSLDLDDWPVELIKVMS | |
| | SIGNELANSVWEESSQGRTKPSVDSTREEKERWIRAKYEQKLFLAPLPCTELSL | |
| | GQHLLRATADEDLRTAILLLAHGSRDEVNETCGEGDGRTALHLACRKGNVVLAQ | |
| | LLIWYGVDVTARDAHGNTALAYARQASSQECIDVLLQYGCPDERFVLMATPNLS | |
| | RRNNNRNNSSGRVPTII | |
| ALK- | MGAIGLLWLLPLLLSTAAVGSGMGTGQRAGSPAAGPPLQPREPLSYSRLQRKSL | 70 |
| ZNF454 | AVDFVVPSLFRVYARDLLLPPSSSELKAGRPEARGSLALDCAPLLRLLGPAPGV | |
| | SWTAGSPAPAEARTLSRVLKGGSVRKLRRAKQLVLELGEEAILEGCVGPPGEAA | |
| | VGLLQFNLSELFSWWIRQGEGRLRIRLMPEKKASEVGREGRLSAAIRASQPRLL | |
| | FQIFGTGHSSLESPTNMPSPSPDYFTWNLTWIMKDSFPFLSHRSRYGLECSFDF | |
| | PCELEYSPPLHDLRNQSWSWRRIPSEEASQMDLLDGPGAERSKEMPRGSFLLLN | |
| | TSADSKHTILSPWMRSSSEHCTLAVSVHRHLQPSGRYIAQLLPHNEAAREILLM | |
| | PTPGKHGWTVLQGRIGRPDNPFRVALEYISSGNRSLSAVDFFALKNCSEGTSPG | |
| | SKMALQSSFTCWNGTVLQLGQACDFHQDCAQGEDESQMCRKLPVGFYCNFEDGF | |
| | CGWTQGTLSPHTPQWQVRTLKDARFQDHQDHALLLSTTDVPASESATVTSATFP | |
| | APIKSSPCELRMSWLIRGVLRGNVSLVLVENKTGKEQGRMVWHVAAYEGLSLWQ | |
| | WMVLPLLDVSDREWLQMVAWWGQGSRAIVAFDNISISLDCYLTISGEDKILQNT | |
| | APKSRNLFERNPNKELKPGENSPRQTPIFDPTVHWLFTTCGASGPHGPTQAQCN | |
| | NAYQNSNLSVEVGSEGPLKGIQIWKVPATDTYSISGYGAAGGKGGKNTMMRSHG | |
| | VSVLGIFNLEKDDMLYILVGQQGEDACPSTNQLIQKVCIGENNVIEEEIRVNRS | |
| | VHEWAGGGGGGGGATYVFKMKDGVPVPLIIAAGGGGRAYGAKTDTFHPERLENN | |
| | SSVLGLNGNSGAAGGGGGWNDNTSLLWAGKSLQEGATGGHSCPQAMKKWGWETR | |
| | GGFGGGGGGCSSGGGGGGYIGGNAASNNDPEMDGEDGVSFISPLGILYTPALKV | |
| | MEGHGEVNIKHYLNCSHCEVDECHMDPESHKVICFCDHGTVLAEDGVSCIVSPT | |
| | PEPHLPLSLILSVVTSALVAALVLAFSGIMIDWMTMPASKKSTVKAEIPEEELD | |
| | QWTIKERFSSSSHWKCASLLEWQCGGQEISLQRVVLTHPNTPSQECDESGSTMS | |
| | SSLHSDQSQGFQPSKNAFECSECGKVFSKSSTLNKHQKIHNEKNANQKIHIKEK | |
| | RYECRECGKAFHQSTHLIHHQRIHTGEKPYECKECGKAFSVSSSLTYHQKIHTG | |
| | EKPFECNLCGKAFIRNIHLAHHHRIHTGEKPFKCNICEKAFVCRAHLTKHQNIH | |
| | SGEKPYKCNECGKAFNQSTSFLQHQRIHTGEKPFECNECGKAFRVNSSLTEHQR | |
| | IHTGEKPYKCNECGKAFRDNSSFARHRKIHTGEKPYRCGLCEKAFRDQSALAQH | |
| | QRIHTGEKPYTCNICEKAFSDHSALTQHKRIHTREKPYKCKICEKAFIRSTHLT | |
| | QHQRIHTGEKPYKCNKCGKAFNQTANLIQHQRHHIGEK | |
| ALK- | MEQSPPPAPEPTQGPTPARSRRRREPESPPASAPTNQLIQKVCIGENNVIEEEI | 71 |
| TTC28 | RVNRSVHEWAGGGGGGGGATYVFKMKDGVPVPLIIAAGGGGRAYGAKTDTFHPE | |
| | RLENNSSVLGLNGNSGAAGGGGGWNDNTSLLWAGKSLQEGATGGHSCPQAMKKW | |
| | GWETRGGFGGGGGGCSSGGGGGGYIGGNAASNNDPEMDGEDGVSFISPLGILYT | |
| | PALKVMEGHGEVNIKHYLNCSHCEVDECHMDPESHKVICFCDHGTVLAEDGVSC | |
| | IVSPTPEPHLPLSLILSVVTSALVAALVLAFSGIMIVYRRKHQELQAMQMELQS | |
| | PEYKLSKLRISTIMTDYNPNYCFAGKTSSISDLKEVPRKNITLIRGLGHGAFGE | |
| | VYEGQVSGMPNDPSPLQVAVKTLPEVCSEQDELDFLMEALIISKENHQNIVRCI | |
| | GVSLQSLPRFILLELMAGGDLKSFLRETRPRPSQPSSLAMLDLLHVARDIACGC | |
| | QYLEENHFIHRDIAARNCLLTCPGPGRVAKIGDFGMARDIYRASYYRKGGCAML | |
| | PVKWMPPEAFMEGIFTSKTDTWSFGVLLWEIFSLGYMPYPSKSNQEVLEFVTSG | |
| | GRMDPPKNCPGPVYRIMTQCWQHQPEDRPNFAIILERIEYCTQDPDVINTALPI | |
| | EYGPLVEEEEKVPVRPKDPEGVPPLLVSQQAKREEERSPAAPPPLPTTSSGKAA | |
| | KKPTAAEISVRVPRGPAVEGGHVNMAFSQSNPPSELHKVHGSRNKPTSLWNPTY | |
| | GSWFTEKPTKKNNPIAKKEPHDRGNLGLEGSCTVPPNVATGRLPGASLLLEPSS | |
| | LTANMKEVPLFRLRHFPCGNVNYGYQQQGLPLEAATAPGAGHYEDTILKSKNSM | |
| | NQPGP | |
| ALK- | MESARENIDLQTNQLIQKVCIGENNVIEEEIRVNRSVHEWAGGGGGGGGATYVF | 72 |
| NINJ2 | KMKDGVPVPLIIAAGGGGRAYGAKTDTFHPERLENNSSVLGLNGNSGAAGGGGG | |
| | WNDNTSLLWAGKSLQEGATGGHSCPQAMKKWGWETRGGFGGGGGGCSSGGGGGG | |
| | YIGGNAASNNDPEMDGEDGVSFISPLGILYTPALKVMEGHGEVNIKHYLNCSHC | |
| | EVDECHMDPESHKVICFCDHGTVLAEDGVSCIVSPTPEPHLPLSLILSVVTSAL | |
| | VAALVLAFSGIMIVYRRKHQELQAMQMELQSPEYKLSKLRTSTIMTDYNPNYCF | |
| | AGKTSSISDLKEVPRKNITLIRGLGHGAFGEVYEGQVSGMPNDPSPLQVAVKTL | |
| | PEVCSEQDELDFLMEALIISKFNHQNIVRCIGVSLQSLPRFILLELMAGGDLKS | |
| | FLRETRPRPSQPSSLAMLDLLHVARDIACGCQYLEENHFIHRDIAARNCLLTCP | |
| | GPGRVAKIGDFGMARDIYRASYYRKGGCAMLPVKWMPPEAFMEGIFTSKTDTWS | |
| | FGVLLWEIFSLGYMPYPSKSNQEVLEFVTSGGRMDPPKNCPGPVYRIMTQCWQH | |
| | QPEDRPNFAIILERIEYCTQDPDVINTALPIEYGPLVEEEEKVPVRPKDPEGVP | |
| | PLLVSQQAKREEERSPAAPPPLPTTSSGKAAKKPTAAEISVRVPRGPAVEGGHV | |
| | NMAFSQSNPPSELHKVHGSRNKPTSLWNPTYGSWFTEKPTKKNNPIAKKEPHDR | |
| | GNLGLEGSCTVPPNVATGRLPGASLLLEPSSLTANMKEVPLFRLRHFPCGNVNY | |
| | GYQQQGLPLEAATAPGAGHYEDTILKSKNSMNQPGP | |
| ALK- | MAKYGEHEASPDNGQNEFSDIIKSRSDEHNDVQKKTFTKWINARFSKSGKPPIN | 73 |
| UTRN | DMFTDLKDGRKLLDLLEGLTGTSLPKERGSTRVHALNNVNRVLQVLHQNNVELV | |
| | NIGGTDIVDGNHKLTLGLLWSIILHWQVKDVMKDVMSDLQQTNSEKILLSWVRQ | |
| | TTRPYSQVNVLNFTTSWTDGLAFNAVLHRHKPDLFSWDKVVKMSPIERLEHAFS | |
| | KAQTYLGIEKLLDPEDVAVQLPDKKSIIMYLTSLFEVLPQQVTIDAIREVETLP | |
| | RKYKKECEEEAINIQSTAPEEEHESPRAETPSTVTEVDMDLDSYQIALEEVLTW | |
| | LLSAEDTFQEQDDISDDVEEVKDQFATHEAFMMELTAHQSSVGSVLQAGNQLIT | |
| | QGTLSDEEEFEIQEQMTLLNARWEALRVESMDRQSRLHDVLMELQKKQLQQLSA | |
| | WLTLTEERIQKMETCPLDDDVKSLQKLLEEHKSLQSDLEAEQVKVNSLTHMVVI | |
| | VDENSGESATAILEDQLQKLGERWTAVCRWTEERWNRLQEINILWQELLEEQCL | |
| | LKAWLTEKEEALNKVQTSNFKDQKELSVSVRRLAILKEDMEMKRQTLDQLSEIG | |
| | QDVGQLLDNSKASKKINSDSEELTQRWDSLVQRLEDSSNQVTQAVAKLGMSQIP | |
| | QKDLLETVRVREQAITKKSKQELPPPPPPKKRQIHVDIEAKKKFDAISAELLNW | |
| | ILKWKTAIQTTEIKEYMKMQDTSEMKKKLKALEKEQRERIPRADELNQTGQILV | |
| | EQMGKEGLPTEEIKNVLEKVSSEWKNVSQHLEDLERKIQLQEDINAYFKQLDEL | |
| | EKVIKTKEEWVKHTSISESSRQSLPSLKDSCQRELTNLLGLHPKIEMARASCSA | |
| | LMSQPSAPDFVQRGFDSFLGRYQAVQEAVEDRQQHLENELKGQPGHAYLETLKT | |
| | LKDVLNDSENKAQVSLNVLNDLAKVEKALQEKKILDEILENQKPALHKLAEETK | |
| | ALEKNVHPDVEKLYKQEFDDVQGKWNKLKVLVSKDLHLLEEIALTLRAFEADST | |
| | VIEKWMDGVKDFLMKQQAAQGDDAGLQRQLDQCSAFVNEIETIESSLKNMKEIE | |
| | TNLRSGPVAGIKTWVQTRLGDYQTQLEKLSKEIATQKSRLSESQEKAANLKKDL | |
| | AEMQEWMTQAEEEYLERDFEYKSPEELESAVEEMKRAKEDVLQKEVRVKILKDN | |
| | IKLLAAKVPSGGQELTSELNVVLENYQLLCNRIRGKCHTLEEVWSCWIELLHYL | |
| | DLETTWLNTLEERMKSTEVLPEKTDAVNEALESLESVLRHPADNRTQIRELGQT | |
| | LIDGGILDDIISEKLEAFNSRYEDLSHLAESKQISLEKQLQVLRETDQMLQVLQ | |
| | ESLGELDKQLTTYLTDRIDAFQVPQEAQKIQAEISAHELTLEELRRNMRSQPLT | |
| | SPESRTARGGSQMDVLQRKLREVSTKFQLFQKPANFEQRMLDCKRVLDGVKAEL | |
| | HVLDVKDVDPDVIQTHLDKCMKLYKTLSEVKLEVETVIKTGRHIVQKQQTDNPK | |
| | GMDEQLTSLKVLYNDLGAQVTEGKQDLERASQLARKMKKEAASLSEWLSATETE | |
| | LVQKSTSEGLLGDLDTEISWAKNVLKDLEKRKADLNTITESSAALQNLIEGSEP | |
| | ILEERLCVLNAGWSRVRTWTEDWCNTLMNHQNQLEIFDGNVAHISTWLYQAEAL | |
| | LDEIEKKPTSKQEEIVKRLVSELDDANLQVENVRDQALILMNARGSSSRELVEP | |
| | KLAELNRNFEKVSQHIKSAKLLIAQEPLYQCLVTTETFETGVPFSDLEKLENDI | |
| | ENMLKFVEKHLESSDEDEKMDEESAQIEEVLQRGEEMLHQPMEDNKKEKIRLQL | |
| | LLLHTRYNKIKAIPIQQRKMGQLASGIRSSLLPTDYLVEINKILLCMDDVELSL | |
| | NVPELNTAIYEDFSFQEDSLKNIKDQLDKLGEQIAVIHEKQPDVILEASGPEAI | |
| | QIRDTLTQLNAKWDRINRMYSDRKGCFDRAMEEWRQFHCDLNDLTQWITEAEEL | |
| | LVDTCAPGGSLDLEKARIHQQELEVGISSHQPSFAALNRTGDGIVQKLSQADGS | |
| | FLKEKLAGLNQRWDAIVAEVKDRQPRLKGESKQVMKYRHQLDEIICWLTKAEHA | |
| | MQKRSTTELGENLQELRDLTQEMEVHAEKLKWLNRTELEMLSDKSLSLPERDKI | |
| | SESLRTVNMTWNKICREVPTTLKECIQEPSSVSQTRIAAHPNVQKVVLVSSASD | |
| | IPVQSHRTSEISIPADLDKTITELADWLVLIDQMLKSNIVTVGDVEEINKTVSR | |
| | MKITKADLEQRHPQLDYVFTLAQNLKNKASSSDMRTAITEKLERVKNQWDGTQH | |
| | GVELRQQQLEDMIIDSLQWDDHREETEELMRKYEARLYILQQARRDPLTKQISD | |
| | NQILLQELGPGDGIVMAFDNVLQKLLEEYGSDDTRNVKETTEYLKTSWINLKQS | |
| | IADRQNALEAEWRTVQASRRDLENFLKWIQEAETTVNVLVDASHRENALQDSIL | |
| | ARELKQQMQDIQAEIDAHNDIFKSIDGNRQKMVKALGNSEEATMLQHRLDDMNQ | |
| | RWNDLKAKSASIRAHLEASAEKWNRLLMSLEELIKWLNMKDEELKKQMPIGGDV | |
| | PALQLQYDHCKALRRELKEKEYSVLNAVDQARVFLADQPIEAPEEPRRNLQSKT | |
| | ELTPEERAQKIAKAMRKQSSEVKEKWESLNAVTSNWQKQVDKALEKLRDLQGAM | |
| | DDLDADMKEAESVRNGWKPVGDLLIDSLQDHIEKIMAFREEIAPINFKVKTVND | |
| | LSSQLSPLDLHPSLKMSRQLDDLNMRWKLLQVSVDDRLKQLQEAHRDFGPSSQH | |
| | FLSTSVQLPWQRSISHNKVPYYINHQTQTTCWDHPKMTELFQSLADLNNVRESA | |
| | YRTAIKIRRLQKALCLDLLELSTTNEIFKQHKLNQNDQLLSVPDVINCLTTTYD | |
| | GLEQMHKDLVNVPLCVDMCLNWLLNVYDTGRTGKIRVQSLKIGLMSLSKGLLEE | |
| | KYRYLFKEVAGPTEMCDQRQLGLLLHDAIQIPRQLGEVAAFGGSNIEPSVRSCF | |
| | QQNNNKPEISVKEFIDWMHLEPQSMVWLPVLHRVAAAETAKHQAKCNICKECPI | |
| | VGFRYRSLKHFNYDVCQSCFFSGRTAKGHKLHYPMVEYCIPTTSGEDVRDFTKV | |
| | LKNKFRSKKYFAKHPRLGYLPVQTVLEGDNLETPITLISMWPEHYDPSQSPQLF | |
| | HDDTHSRIEQYATRLAQMERINGSFLTDSSSTTGSVEDEHALIQQYCQTLGGES | |
| | PVSQPQSPAQILKSVEREERGELERIIADLEEEQRNLQVEYEQLKDQHLRRGLP | |
| | VGSPPESIISPHHTSEDSELIAEAKLLRQHKGRLEARMQILEDHNKQLESQLHR | |
| | LRQLLEQPESDSRINGVSPWASPQHSALSYSLDPDASGPQFHQAVSPTPEPHLP | |
| | LSLILSVVTSALVAALVLAFSGIMIVYRRKHQELQAMQMELQSPEYKLSKIRTS | |
| | TIMTDYNPNYCFAGKTSSISDLKEVPRKNITLIRGLGHGAFGEVYEGQVSGMPN | |
| | DPSPLQVAVKTLPEVCSEQDELDELMEALIISKENHQNIVRCIGVSLQSLPRFI | |
| | LLELMAGGDLKSFLRETRPRPSQPSSLAMLDLLHVARDIACGCQYLEENHFIHR | |
| | DIAARNCLLTCPGPGRVAKIGDFGMARDIYRASYYRKGGCAMLPVKWMPPEAFM | |
| | EGIFTSKTDTWSFGVLLWEIFSLGYMPYPSKSNQEVLEFVTSGGRMDPPKNCPG | |
| | PVYRIMTQCWQHQPEDRPNFAIILERIEYCTQDPDVINTALPIEYGPLVEEEEK | |
| | VPVRPKDPEGVPPLLVSQQAKREEERSPAAPPPLPTTSSGKAAKKPTAAEISVR | |
| | VPRGPAVEGGHVNMAFSQSNPPSELHKVHGSRNKPTSLWNPTYGSWFTEKPTKK | |
| | NNPIAKKEPHDRGNLGLEGSCTVPPNVATGRLPGASLLLEPSSLTANMKEVPLF | |
| | RLRHFPCGNVNYGYQQQGLPLEAATAPGAGHYEDTILKSKNSMNQPGP | |
| ALK- | MVDYHAANQSYQYGPSSAGNGAGGGGSMGDYMAQEDDWDRDLLLDPAWEKQQRK | 74 |
| ACTN4 | TFTAWCNSHLRKAGTQIENIDEDFRDGLKLMLLLEVISGERLPKPERGKMRVHK | |
| | INNVNKALDFIASKGVKLVSIGAEEIVDGNAKMTLGMIWTIILRFAIQDISVEE | |
| | TSAKEGLLLWCQRKTAPYKNVNVQNFHISWKDGLAFNALIHRHRPELIEYDKLR | |
| | KDDPVTNLNNAFEVAEKYLDIPKMLDAEVYRRKHQELQAMQMELQSPEYKLSKL | |
| | RTSTIMTDYNPNYCFAGKTSSISDLKEVPRKNITLIRGLGHGAFGEVYEGQVSG | |
| | MPNDPSPLQVAVKTLPEVCSEQDELDFLMEALIISKFNHQNIVRCIGVSLQSLP | |
| | RFILLELMAGGDLKSFLRETRPRPSQPSSLAMLDLLHVARDIACGCQYLEENHF | |
| | IHRDIAARNCLLTCPGPGRVAKIGDFGMARDIYRASYYRKGGCAMLPVKWMPPE | |
| | AFMEGIFTSKTDTWSFGVLLWEIFSLGYMPYPSKSNQEVLEFVTSGGRMDPPKN | |
| | CPGPVYRIMTQCWQHQPEDRPNFAIILERIEYCTQDPDVINTALPIEYGPLVEE | |
| | EEKVPVRPKDPEGVPPLLVSQQAKREEERSPAAPPPLPTTSSGKAAKKPTAAEI | |
| | SVRVPRGPAVEGGHVNMAFSQSNPPSELHKVHGSRNKPTSLWNPTYGSWFTEKP | |
| | TKKNNPIAKKEPHDRGNLGLEGSCTVPPNVATGRLPGASLLLEPSSLTANMKEV | |
| | PLFRLRHFPCGNVNYGYQQQGLPLEAATAPGAGHYEDTILKSKNSMNQPGP | |
| ALK- | MGRPESAGGGSRGPFEGGGRARRAGGIFLTLSILRTRDLPSGAMSEGVDLIDIY | 75 |
| CPSF7 | ADEEFNQDPEFNNTDQIDLYDDVLTATSQPSDDRSSSTEPPPPVRQEPSPKPNN | |
| | KTPAILYTYSGLRNRRAAVYVGSFSWWTTDQQLIQVIRSIGVYDVVELKFAENR | |
| | ANGQSKGYAEVVVASENSVHKLLELLPGKVLNGEKVDVRPATRQNLSQFEAQAR | |
| | KRECVRVPRGVYRRKHQELQAMQMELQSPEYKLSKLRISTIMTDYNPNYCFAGK | |
| | TSSISDLKEVPRKNITLIRGLGHGAFGEVYEGQVSGMPNDPSPLQVAVKTLPEV | |
| | CSEQDELDELMEALIISKENHQNIVRCIGVSLQSLPRFILLELMAGGDLKSFLR | |
| | ETRPRPSQPSSLAMLDLLHVARDIACGCQYLEENHFIHRDIAARNCLLTCPGPG | |
| | RVAKIGDFGMARDIYRASYYRKGGCAMLPVKWMPPEAFMEGIFTSKTDTWSFGV | |
| | LLWEIFSLGYMPYPSKSNQEVLEFVTSGGRMDPPKNCPGPVYRIMTQCWQHQPE | |
| | DRPNFAIILERIEYCTQDPDVINTALPIEYGPLVEEEEKVPVRPKDPEGVPPLL | |
| | VSQQAKREEERSPAAPPPLPTTSSGKAAKKPTAAEISVRVPRGPAVEGGHVNMA | |
| | FSQSNPPSELHKVHGSRNKPTSLWNPTYGSWFTEKPTKKNNPIAKKEPHDRGNL | |
| | GLEGSCTVPPNVATGRLPGASLLLEPSSLTANMKEVPLFRLRHFPCGNVNYGYQ | |
| | QQGLPLEAATAPGAGHYEDTILKSKNSMNQPGP | |
| ALK- | MAAAKVALTKRADPAELRTIFLKYASIEKNGEFFMSPNDFVTRYLNIFGESQPN | 76 |
| SLC25A13 | PKTVELLSGVVDQTKDGLISFQEFVAFESVLCAPDALFMVAFQLEDKAGKGEVT | |
| | FEDVKQVFGQTTIHQHIPFNWDSEFVQLHFGKERKRHLTYAEFTQFLLEIQLEH | |
| | AKQAFVQRDNARTGRVTAIDERDIMVTIRPHVLTPFVEECLVAAAGGTTSHQVS | |
| | FSYFNGFNSLLNNMELIRKIYSTLAGTRKDVEVTKEEFVLAAQKFGQVTPMEVD | |
| | ILFQLADLYEPRGRMTLADIERIAPLEEGTLPFNLAEAQRQKASGDSARPVLLQ | |
| | VAESAYRFGLGSVAGVYRRKHQELQAMQMELQSPEYKLSKLRISTIMTDYNPNY | |
| | CFAGKTSSISDLKEVPRKNITLIRGLGHGAFGEVYEGQVSGMPNDPSPLQVAVK | |
| | TLPEVCSEQDELDFLMEALIISKFNHQNIVRCIGVSLQSLPRFILLELMAGGDL | |
| | KSFLRETRPRPSQPSSLAMLDLLHVARDIACGCQYLEENHFIHRDIAARNCLLT | |
| | CPGPGRVAKIGDFGMARDIYRASYYRKGGCAMLPVKWMPPEAFMEGIFTSKTDT | |
| | WSFGVLLWEIFSLGYMPYPSKSNQEVLEFVTSGGRMDPPKNCPGPVYRIMTQCW | |
| | QHQPEDRPNFAIILERIEYCTQDPDVINTALPIEYGPLVEEEEKVPVRPKDPEG | |
| | VPPLLVSQQAKREEERSPAAPPPLPTTSSGKAAKKPTAAEISVRVPRGPAVEGG | |
| | HVNMAFSQSNPPSELHKVHGSRNKPTSLWNPTYGSWFTEKPTKKNNPIAKKEPH | |
| | DRGNLGLEGSCTVPPNVATGRLPGASLLLEPSSLTANMKEVPLFRLRHFPCGNV | |
| | NYGYQQQGLPLEAATAPGAGHYEDTILKSKNSMNQPGP | |
| ALK- | MDDSEVESTASILASVKEQEAQFEKLTRALEEERRHVSAQLERVRVSPQDANPL | 77 |
| CTNND1 | MANGTLTRRHQNGRFVGDADLERQKFSDLKLNGPQDHSHLLYSTIPRMQEPGQI | |
| | VETYTEEDPEGAMSVVSVETSDDGTTRRTETTVKKVVKTVTTRTVQPVAMGPDG | |
| | LPVDASSVSNNYIQTLGRDFRKNGNGGPGPYVGQAGTATLPRNFHYPPDGYSRH | |
| | YEDGYPGGSDNYGSLSRVTRIEERYRPSMEGYRAPSRQDVYGPQPQVRVGGSSV | |
| | DLHRFHPEPYGLEDDQRSMGYDDLDYGMMSDYGTARRTGTPSDPRRRLRSYEDM | |
| | IGEEVPSDQYYWAPLAQHERGSLASLDSLRKGGPPPPNWRQPELPEVIAMLGER | |
| | LDAVKSNAAAYLQHLCYRNDKVKTDVRKLKGIPVLVGLLDHPKKEVHLGACGAL | |
| | KNISFGRDQDNKIAIKNCDGVPALVRLLRKARDMDLTEVITGTLWNLSSHDSIK | |
| | MEIVDHALHALTDEVIIPHSGWEREPNEDCKPRHIEWESVLINTAGCLRNVSSE | |
| | RSEARRKLRECDGLVDALIFIVQAEIGQKDSDSKLVENCVCLLRNLSYQVHREI | |
| | PQAERYQEAAPNVANNTGPHAASCFGAKKGKGKKPIEDPANDTVDFPKRISPAR | |
| | GYELLFQPEVVRIYISLLKESKTPAILEASAGAIQNLCAGRWTYGRYIRSALRQ | |
| | EKALSAIADLLTNEHERVVKAASGALRNLAVDARNKELIGKHAIPNLVKNLPGG | |
| | QQNSSWNFSEDTVISILNTINEVIAENLEAAKKLRETQGIEKLVLINKSGNRSE | |
| | KEVRAAALVLQTIWGYKELRKPLEKEGWKKSDFQVNLNNASRSQSSHSYDDSTL | |
| | PLIDRNQKSVYRRKHQELQAMQMELQSPEYKLSKLRTSTIMTDYNPNYCFAGKT | |
| | SSISDLKEVPRKNITLIRGLGHGAFGEVYEGQVSGMPNDPSPLQVAVKTLPEVC | |
| | SEQDELDELMEALIISKENHQNIVRCIGVSLQSLPRFILLELMAGGDLKSFLRE | |
| | TRPRPSQPSSLAMLDLLHVARDIACGCQYLEENHFIHRDIAARNCLLTCPGPGR | |
| | VAKIGDFGMARDIYRASYYRKGGCAMLPVKWMPPEAFMEGIFTSKIDTWSFGVL | |
| | LWEIFSLGYMPYPSKSNQEVLEFVTSGGRMDPPKNCPGPVYRIMTQCWQHQPED | |
| | RPNFAIILERIEYCTQDPDVINTALPIEYGPLVEEEEKVPVRPKDPEGVPPLLV | |
| | SQQAKREEERSPAAPPPLPTTSSGKAAKKPTAAEISVRVPRGPAVEGGHVNMAF | |
| | SQSNPPSELHKVHGSRNKPTSLWNPTYGSWFTEKPTKKNNPIAKKEPHDRGNLG | |
| | LEGSCTVPPNVATGRLPGASLLLEPSSLTANMKEVPLFRLRHFPCGNVNYGYQQ | |
| | QGLPLEAATAPGAGHYEDTILKSKNSMNQPGP | |
| ALK-KLC4 | MSGLVLGQRDEPAGHRLSQEEILGSTRLVSQGLEALRSEHQAVLQSLSQTIECL | 78 |
| | QQGGHEEGLVHEKARQLRRSMENIELGLSEAQVMLALASHLSTVESEKQKLRAQ | |
| | VRRLCQENQWLRDELAGTQQRLQRSEQAVAQLEEEKKHLEFLGQLRQYDEDGHT | |
| | SEEKEGDATKDSLDDLFPNEEEEDPSNGLSRGQGATAAQQGGYEIPARLRTLHN | |
| | LVIQYAAQGRYEVAVPLCKQALEDLERTSGRGHPDVATMLNILALVYRDQNKYK | |
| | EAAHLLNDALSIRESTLGPDHPAVAATLNNLAVLYGKRGKYKEAEPLCQRALEI | |
| | REKVLGTNHPDVAKQLNNLALLCQNQGKYEAVERYYQRALAIYEGQLGPDNPNV | |
| | ARTKNNLASCYLKQGKYAEAETLYKEILTRAHVQEFGSVDVYRRKHQELQAMQM | |
| | ELQSPEYKLSKLRISTIMTDYNPNYCFAGKTSSISDLKEVPRKNITLIRGLGHG | |
| | AFGEVYEGQVSGMPNDPSPLQVAVKTLPEVCSEQDELDELMEALIISKENHQNI | |
| | VRCIGVSLQSLPRFILLELMAGGDLKSFLRETRPRPSQPSSLAMLDLLHVARDI | |
| | ACGCQYLEENHFIHRDIAARNCLLTCPGPGRVAKIGDFGMARDIYRASYYRKGG | |
| | CAMLPVKWMPPEAFMEGIFTSKTDTWSFGVLLWEIFSLGYMPYPSKSNQEVLEF | |
| | VTSGGRMDPPKNCPGPVYRIMTQCWQHQPEDRPNFAIILERIEYCTQDPDVINT | |
| | ALPIEYGPLVEEEEKVPVRPKDPEGVPPLLVSQQAKREEERSPAAPPPLPTTSS | |
| | GKAAKKPTAAEISVRVPRGPAVEGGHVNMAFSQSNPPSELHKVHGSRNKPTSLW | |
| | NPTYGSWFTEKPTKKNNPIAKKEPHDRGNLGLEGSCTVPPNVATGRLPGASLLL | |
| | EPSSLTANMKEVPLFRLRHFPCGNVNYGYQQQGLPLEAATAPGAGHYEDTILKS | |
| | KNSMNQPGP | |
| ALK- | MSNSHPLRPFTAVGEIDHVHILSEHIGALLIGEEYGDVTFVVEKKRFPAHRVIL | 79 |
| BTBD9 | AARCQYFRALLYGGMRESQPEAEIPLQDTTAEAFTMLLKYIYTGRATLTDEKEE | |
| | VLLDFLSLAHKYGFPELEDSTSEYLCTILNIQNVCMTFDVASLYSLPKLTCMCC | |
| | MFMDRNAQEVLSSEGFLSLSKTALLNIVLRDSFAAPEKDIFLALLNWCKANSKE | |
| | NHAEIMQAVRLPLMSLTELLNVVRPSGLLSPDAILDAIKVRSESRDMDLNYRGM | |
| | LMYRRKHQELQAMQMELQSPEYKLSKLRISTIMTDYNPNYCFAGKTSSISDLKE | |
| | VPRKNITLIRGLGHGAFGEVYEGQVSGMPNDPSPLQVAVKTLPEVCSEQDELDF | |
| | LMEALIISKFNHQNIVRCIGVSLQSLPRFILLELMAGGDLKSFLRETRPRPSQP | |
| | SSLAMLDLLHVARDIACGCQYLEENHFIHRDIAARNCLLTCPGPGRVAKIGDFG | |
| | MARDIYRASYYRKGGCAMLPVKWMPPEAFMEGIFTSKIDTWSFGVLLWEIFSLG | |
| | YMPYPSKSNQEVLEFVTSGGRMDPPKNCPGPVYRIMTQCWQHQPEDRPNFAIIL | |
| | ERIEYCTQDPDVINTALPIEYGPLVEEEEKVPVRPKDPEGVPPLLVSQQAKREE | |
| | ERSPAAPPPLPTTSSGKAAKKPTAAEISVRVPRGPAVEGGHVNMAFSQSNPPSE | |
| | LHKVHGSRNKPTSLWNPTYGSWFTEKPTKKNNPIAKKEPHDRGNLGLEGSCTVP | |
| | PNVATGRLPGASLLLEPSSLTANMKEVPLFRLRHFPCGNVNYGYQQQGLPLEAA | |
| | TAPGAGHYEDTILKSKNSMNQPGP | |
| ALK-CPQ | MKFLIFAFFGGVHLLSLCSGKAICKNGISKRTFEEIKEEIASCGDVAKAIINLA | 81 |
| | VYGKAQNRSYERLALLVDTVGPRLSGSKNLEKAIQIMYQNLQQDGLEKVHLEPV | |
| | RIPHWERGEESAVMLEPRIHKIAILGLGSSIGTPPEGITAEVLVVTSFDELQRR | |
| | ASEARGKIVVYNQPYINYSRTVQYRTQGAVEAAKVGALASLIRSVASFSIYSPH | |
| | TGIQEYQDGVPKIPTACITVEDAEMMSRMASHGIKIVIQLKMGAKTYPDTDSEN | |
| | TVAEITGSKYPEQVVLVSGHLDSWDVGQGAMDDGGGAFISWEALSLIKDLGLRP | |
| | KRTLRLVLWTAEEQGGVGAFQYYQLHKVNISNYSLVMESDAGTFLPTGLQFTGS | |
| | EKARAIMEEVMSLLQPLNITQVLSHGEGTDINFWIQAGVPVYRRKHQELQAMQM | |
| | ELQSPEYKLSKLRISTIMTDYNPNYCFAGKTSSISDLKEVPRKNITLIRGLGHG | |
| | AFGEVYEGQVSGMPNDPSPLQVAVKTLPEVCSEQDELDELMEALIISKENHQNI | |
| | VRCIGVSLQSLPRFILLELMAGGDLKSFLRETRPRPSQPSSLAMLDLLHVARDI | |
| | ACGCQYLEENHFIHRDIAARNCLLTCPGPGRVAKIGDFGMARDIYRASYYRKGG | |
| | CAMLPVKWMPPEAFMEGIFTSKTDTWSFGVLLWEIFSLGYMPYPSKSNQEVLEF | |
| | VTSGGRMDPPKNCPGPVYRIMTQCWQHQPEDRPNFAIILERIEYCTQDPDVINT | |
| | ALPIEYGPLVEEEEKVPVRPKDPEGVPPLLVSQQAKREEERSPAAPPPLPTTSS | |
| | GKAAKKPTAAEISVRVPRGPAVEGGHVNMAFSQSNPPSELHKVHGSRNKPTSLW | |
| | NPTYGSWFTEKPTKKNNPIAKKEPHDRGNLGLEGSCTVPPNVATGRLPGASLLL | |
| | EPSSLTANMKEVPLFRLRHFPCGNVNYGYQQQGLPLEAATAPGAGHYEDTILKS | |
| | KNSMNQPGP | |
| ALK- | MADPAECSIKVMCRFRPLNEAEILRGDKFIPKFKGDETVVIGQGKPYVFDRVLP | 83 |
| KIF5C | PNTTQEQVYNACAKQIVKDVLEGYNGTIFAYGQTSSGKTHTMEGKLHDPQLMGI | |
| | IPRIAHDIFDHIYSMDENLEFHIKVSYFEIYLDKIRDLLDVSKINLAVHEDKNR | |
| | VPYVKGCTERFVSSPEEVMDVIDEGKANRHVAVINMNEHSSRSHSIFLINIKQE | |
| | NVETEKKLSGKLYLVDLAGSEKVSKTGAEGAVLDEAKNINKSLSALGNVISALA | |
| | EGTKTHVPYRDSKMTRILQDSLGGNCRTTIVICCSPSVENEAETKSTLMFGQRA | |
| | KTIKNTVSVNLELTAEEWKKKYEKEKEKNKTLKNVIQHLEMELNRWRNVYRRKH | |
| | QELQAMQMELQSPEYKLSKLRISTIMTDYNPNYCFAGKTSSISDLKEVPRKNIT | |
| | LIRGLGHGAFGEVYEGQVSGMPNDPSPLQVAVKTLPEVCSEQDELDELMEALII | |
| | SKFNHQNIVRCIGVSLQSLPRFILLELMAGGDLKSFLRETRPRPSQPSSLAMLD | |
| | LLHVARDIACGCQYLEENHFIHRDIAARNCLLTCPGPGRVAKIGDFGMARDIYR | |
| | ASYYRKGGCAMLPVKWMPPEAFMEGIFTSKTDTWSFGVLLWEIFSLGYMPYPSK | |
| | SNQEVLEFVTSGGRMDPPKNCPGPVYRIMTQCWQHQPEDRPNFAIILERIEYCT | |
| | QDPDVINTALPIEYGPLVEEEEKVPVRPKDPEGVPPLLVSQQAKREEERSPAAP | |
| | PPLPTTSSGKAAKKPTAAEISVRVPRGPAVEGGHVNMAFSQSNPPSELHKVHGS | |
| | RNKPTSLWNPTYGSWFTEKPTKKNNPIAKKEPHDRGNLGLEGSCTVPPNVATGR | |
| | LPGASLLLEPSSLTANMKEVPLFRLRHFPCGNVNYGYQQQGLPLEAATAPGAGH | |
| | YEDTILKSKNSMNQPGP | |
| ALK- | MAVASDFYLRYYVGHKGKFGHEFLEFEFRPDVYRRKHQELQAMQMELQSPEYKL | 84 |
| MAGOHB | SKLRTSTIMTDYNPNYCFAGKTSSISDLKEVPRKNITLIRGLGHGAFGEVYEGQ | |
| | VSGMPNDPSPLQVAVKTLPEVCSEQDELDELMEALIISKENHQNIVRCIGVSLQ | |
| | SLPRFILLELMAGGDLKSFLRETRPRPSQPSSLAMLDLLHVARDIACGCQYLEE | |
| | NHFIHRDIAARNCLLTCPGPGRVAKIGDFGMARDIYRASYYRKGGCAMLPVKWM | |
| | PPEAFMEGIFTSKTDTWSFGVLLWEIFSLGYMPYPSKSNQEVLEFVTSGGRMDP | |
| | PKNCPGPVYRIMTQCWQHQPEDRPNFAIILERIEYCTQDPDVINTALPIEYGPL | |
| | VEEEEKVPVRPKDPEGVPPLLVSQQAKREEERSPAAPPPLPTTSSGKAAKKPTA | |
| | AEISVRVPRGPAVEGGHVNMAFSQSNPPSELHKVHGSRNKPTSLWNPTYGSWFT | |
| | EKPTKKNNPIAKKEPHDRGNLGLEGSCTVPPNVATGRLPGASLLLEPSSLTANM | |
| | KEVPLFRLRHFPCGNVNYGYQQQGLPLEAATAPGAGHYEDTILKSKNSMNQPGP | |
| ALK- | MMSFVQKGSWLLLALLHPTIILAQQEAVEGGCSHLGQSYADRDVWKPEPCQICV | 86 |
| COL3A1 | CDSGSVLCDDIICDDQELDCPNPEIPFGECCAVCPQPPTAPTRPPNGQGPQGPK | |
| | GDPGPPGIPGRNGDPGIPGQPGSPGSPGPPGICESCPTGPQNYSPQYDSYDVKS | |
| | GVAVGGLAGYPGPAGPPGPPGPPGTSGHPGSPGSPGYQGPPGEPGQAGPSGPPG | |
| | PPGAIGPSGPAGKDGESGRPGRPGERGLPGPPGIKGPAGIPGFPGMKGHRGFDG | |
| | RNGEKGETGAPGLKGENGLPGENGAPGPMGPRGAPGERGRPGLPGAAGARGNDG | |
| | ARGSDGQPGPPGPPGTAGFPGSPGAKGEVGPAGSPGSNGAPGQRGEPGPQGHAG | |
| | AQGPPGPPGINGSPGGKGEMGPAGIPGAPGLMGARGPPGPAGANGAPGLRGGAG | |
| | EPGKNGAKGEPGPRGERGEAGIPGVPGAKGEDGKDGSPGEPGANGLPGAAGERG | |
| | APGFRGPAGPNGIPGEKGPAGERGAPGPAGPRGAAGEPGRDGVPGGPGMRGMPG | |
| | SPGGPGSDGKPGPPGSQGESGRPGPPGPSGPRGQPGVMGFPGPKGNDGAPGKNG | |
| | ERGGPGGPGPQGPPGKNGETGPQGPPGPTGPGGDKGDTGPPGPQGLQGLPGTGG | |
| | PPGENGKPGEPGPKGDAGAPGAPGGKGDAGAPGERGPPGLAGAPGLRGGAGPPG | |
| | PEGGKGAAGPPGPPGAAGTPGLQGMPGERGGLGSPGPKGDKGEPGGPGADGVPG | |
| | KDGPRGPTGPIGPPGPAGQPGDKGEGGAPGLPGIAGPRGSPGERGETGPPGPAG | |
| | FPGAPGQNGEPGGKGERGAPGEKGEGGPPGVAGPPGGSGPAGPPGPQGVKGERG | |
| | SPGGPGAAGFPGARGLPGPPGSNGNPGPPGPSGSPGKDGPPGPAGNTGAPGSPG | |
| | VSGPKGDAGQPGEKGSPGAQGPPGAPGPLGIAGITGARGLAGPPGMPGPRGSPG | |
| | PQGVKGESGKPGANGLSGERGPPGPQGLPGLAGTAGEPGRDGNPGSDGLPGRDG | |
| | SPGGKGDRGENGSPGAPGAPGHPGPPGPVGPAGKSGDRGESGPAGPAGAPGPAG | |
| | SRGAPGPQGPRGDKGETGERGAAGIKGHRGFPGNPGAPGSPGPAGQQGAIGSPG | |
| | PAGPRGPVGPSGPPGKDGTSGHPGPIGPPGPRGNRGERGSEGSPGHPGQPGPPG | |
| | PPGAPGPCCGGVGAAAIAGIGGEKAGGFAPYYGDEPMDFKINTDEIMTSLKSVN | |
| | GQIESLISPDGSRKNPARNCRDLKFCHPELKSVSPTPEPHLPLSLILSVVTSAL | |
| | VAALVLAFSGIMIVYRRKHQELQAMQMELQSPEYKLSKLRTSTIMTDYNPNYCF | |
| | AGKTSSISDLKEVPRKNITLIRGLGHGAFGEVYEGQVSGMPNDPSPLQVAVKTL | |
| | PEVCSEQDELDELMEALIISKENHQNIVRCIGVSLQSLPRFILLELMAGGDLKS | |
| | FLRETRPRPSQPSSLAMLDLLHVARDIACGCQYLEENHFIHRDIAARNCLLTCP | |
| | GPGRVAKIGDFGMARDIYRASYYRKGGCAMLPVKWMPPEAFMEGIFTSKTDTWS | |
| | FGVLLWEIFSLGYMPYPSKSNQEVLEFVTSGGRMDPPKNCPGPVYRIMTQCWQH | |
| | QPEDRPNFAIILERIEYCTQDPDVINTALPIEYGPLVEEEEKVPVRPKDPEGVP | |
| | PLLVSQQAKREEERSPAAPPPLPTTSSGKAAKKPTAAEISVRVPRGPAVEGGHV | |
| | NMAFSQSNPPSELHKVHGSRNKPTSLWNPTYGSWFTEKPTKKNNPIAKKEPHDR | |
| | GNLGLEGSCTVPPNVATGRLPGASLLLEPSSLTANMKEVPLFRLRHFPCGNVNY | |
| | GYQQQGLPLEAATAPGAGHYEDTILKSKNSMNQPGP | |

[0245] In some embodiments, the ALK-COL3A1 fusion polypeptide of the disclosure comprises the amino acid sequence of SEQ ID NO: 44, or an amino acid sequence having at least about 70% (e.g., any of about 70%, 71%, 72%, 73%, 74%, 75%, 76%, 77%, 78%, 79%, 80%, 81%, 82%, 83%, 84%, 85%, 86%, 87%, 88%, 89%, 90%, 91%, 92%, 93%, 94%, 95%, 96%, 97%, 98%, 99%, or 100%) sequence homology thereto. In some embodiments, the ALK-CDC42BPA fusion polypeptide of the disclosure comprises the amino acid sequence of SEQ ID NO: 45, or an amino acid sequence having at least about 70% (e.g., any of about 70%, 71%, 72%, 73%, 74%, 75%, 76%, 77%, 78%, 79%, 80%, 81%, 82%, 83%, 84%, 85%, 86%, 87%, 88%, 89%, 90%, 91%, 92%, 93%, 94%, 95%, 96%, 97%, 98%, 99%, or 100%) sequence homology thereto. In some embodiments, the ALK-EPHA2 fusion polypeptide of the disclosure comprises the amino acid sequence of SEQ ID NO: 46, or an amino acid sequence having at least about 70% (e.g., any of about 70%, 71%, 72%, 73%, 74%, 75%, 76%, 77%, 78%, 79%, 80%, 81%, 82%, 83%, 84%, 85%, 86%, 87%, 88%, 89%, 90%, 91%, 92%, 93%, 94%, 95%, 96%, 97%, 98%, 99%, or 100%) sequence homology thereto. In some embodiments, the ALK-MYOSC fusion polypeptide of the disclosure comprises the amino acid sequence of SEQ ID NO: 47, or an amino acid sequence having at least about 70% (e.g., any of about 70%, 71%, 72%, 73%, 74%, 75%, 76%, 77%, 78%, 79%, 80%, 81%, 82%, 83%, 84%, 85%, 86%, 87%, 88%, 89%, 90%, 91%, 92%, 93%, 94%, 95%, 96%, 97%, 98%, 99%, or 100%) sequence homology thereto. In some embodiments, the ALK-TRIM24 fusion polypeptide of the disclosure comprises the amino acid sequence of SEQ ID NO: 48, or an amino acid sequence having at least about 70% (e.g., any of about 70%, 71%, 72%, 73%, 74%, 75%, 76%, 77%, 78%, 79%, 80%, 81%, 82%, 83%, 84%, 85%, 86%, 87%, 88%, 89%, 90%, 91%, 92%, 93%, 94%, 95%, 96%, 97%, 98%, 99%, or 100%) sequence homology thereto. In some embodiments, the ALK-SKAP1 fusion polypeptide of the disclosure comprises the amino acid sequence of SEQ ID NO: 49, or an amino acid sequence having at least about 70% (e.g., any of about 70%, 71%, 72%, 73%, 74%, 75%, 76%, 77%, 78%, 79%, 80%, 81%, 82%, 83%, 84%, 85%, 86%, 87%, 88%, 89%, 90%, 91%, 92%, 93%, 94%, 95%, 96%, 97%, 98%, 99%, or 100%) sequence homology thereto. In some embodiments, the ALK-UBE3B fusion polypeptide of the disclosure comprises the amino acid sequence of SEQ ID NO: 50, or an amino acid sequence having at least about 70% (e.g., any of about 70%, 71%, 72%, 73%, 74%, 75%, 76%, 77%, 78%, 79%, 80%, 81%, 82%, 83%, 84%, 85%, 86%, 87%, 88%, 89%, 90%, 91%, 92%, 93%, 94%, 95%, 96%, 97%, 98%, 99%, or 100%) sequence homology thereto. In some embodiments, the ALK-TNS3 fusion polypeptide of the disclosure comprises the amino acid sequence of SEQ ID NO: 51, or an amino acid sequence having at least about 70% (e.g., any of about 70%, 71%, 72%, 73%, 74%, 75%, 76%, 77%, 78%, 79%, 80%, 81%, 82%, 83%, 84%, 85%, 86%, 87%, 88%, 89%, 90%, 91%, 92%, 93%, 94%, 95%, 96%, 97%, 98%, 99%, or 100%) sequence homology thereto. In some embodiments, the ALK-C2orf73 fusion polypeptide of the disclosure comprises the amino acid sequence of SEQ ID NO: 52, or an amino acid sequence having at least about 70% (e.g., any of about 70%, 71%, 72%, 73%, 74%, 75%, 76%, 77%, 78%, 79%, 80%, 81%, 82%, 83%, 84%, 85%, 86%, 87%, 88%, 89%, 90%, 91%, 92%, 93%, 94%, 95%, 96%, 97%, 98%, 99%, or 100%) sequence homology thereto. In some embodiments, the ALK-AZI2 fusion polypeptide of the disclosure comprises the amino acid sequence of SEQ ID NO: 53, or an amino acid sequence having at least about 70% (e.g., any of about 70%, 71%, 72%, 73%, 74%, 75%, 76%, 77%, 78%, 79%, 80%, 81%, 82%, 83%, 84%, 85%, 86%, 87%, 88%, 89%, 90%, 91%, 92%, 93%, 94%, 95%, 96%, 97%, 98%, 99%, or 100%) sequence homology thereto. In some embodiments, the ALK-MANBA fusion polypeptide of the disclosure comprises the amino acid sequence of SEQ ID NO: 54, or an amino acid sequence having at least about 70% (e.g., any of about 70%, 71%, 72%, 73%, 74%, 75%, 76%, 77%, 78%, 79%, 80%, 81%, 82%, 83%, 84%, 85%, 86%, 87%, 88%, 89%, 90%, 91%, 92%, 93%, 94%, 95%, 96%, 97%, 98%, 99%, or 100%) sequence homology thereto. In some embodiments, the ALK-CNTNAP5 fusion polypeptide of the disclosure comprises the amino acid sequence of SEQ ID NO: 55, or an amino acid sequence having at least about 70% (e.g., any of about 70%, 71%, 72%, 73%, 74%, 75%, 76%, 77%, 78%, 79%, 80%, 81%, 82%, 83%, 84%, 85%, 86%, 87%, 88%, 89%, 90%, 91%, 92%, 93%, 94%, 95%, 96%, 97%, 98%, 99%, or 100%) sequence homology thereto. In some embodiments, the ALK-TANGO6 fusion polypeptide of the disclosure comprises the amino acid sequence of SEQ ID NO: 57, or an amino acid sequence having at least about 70% (e.g., any of about 70%, 71%, 72%, 73%, 74%, 75%, 76%, 77%, 78%, 79%, 80%, 81%, 82%, 83%, 84%, 85%, 86%, 87%, 88%, 89%, 90%, 91%, 92%, 93%, 94%, 95%, 96%, 97%, 98%, 99%, or 100%) sequence homology thereto. In some embodiments, the ALK-NFIA fusion polypeptide of the disclosure comprises the amino acid sequence of SEQ ID NO: 58, or an amino acid sequence having at least about 70% (e.g., any of about 70%, 71%, 72%, 73%, 74%, 75%, 76%, 77%, 78%, 79%, 80%, 81%, 82%, 83%, 84%, 85%, 86%, 87%, 88%, 89%, 90%, 91%, 92%, 93%, 94%, 95%, 96%, 97%, 98%, 99%, or 100%) sequence homology thereto. In some embodiments, the ALK-RPS6KA5 fusion polypeptide of the disclosure comprises the amino acid sequence of SEQ ID NO: 59, or an amino acid sequence having at least about 70% (e.g., any of about 70%, 71%, 72%, 73%, 74%, 75%, 76%, 77%, 78%, 79%, 80%, 81%, 82%, 83%, 84%, 85%, 86%, 87%, 88%, 89%, 90%, 91%, 92%, 93%, 94%, 95%, 96%, 97%, 98%, 99%, or 100%) sequence homology thereto. In some embodiments, the ALK-TG fusion polypeptide of the disclosure comprises the amino acid sequence of SEQ ID NO: 60, or an amino acid sequence having at least about 70% (e.g., any of about 70%, 71%, 72%, 73%, 74%, 75%, 76%, 77%, 78%, 79%, 80%, 81%, 82%, 83%, 84%, 85%, 86%, 87%, 88%, 89%, 90%, 91%, 92%, 93%, 94%, 95%, 96%, 97%, 98%, 99%, or 100%) sequence homology thereto. In some embodiments, the ALK-LRRFIP2 fusion polypeptide of the disclosure comprises the amino acid sequence of SEQ ID NO: 61, or an amino acid sequence having at least about 70% (e.g., any of about 70%, 71%, 72%, 73%, 74%, 75%, 76%, 77%, 78%, 79%, 80%, 81%, 82%, 83%, 84%, 85%, 86%, 87%, 88%, 89%, 90%, 91%, 92%, 93%, 94%, 95%, 96%, 97%, 98%, 99%, or 100%) sequence homology thereto. In some embodiments, the ALK-MYO5C fusion polypeptide of the disclosure comprises the amino acid sequence of SEQ ID NO: 62, or an amino acid sequence having at least about 70% (e.g., any of about 70%, 71%, 72%, 73%, 74%, 75%, 76%, 77%, 78%, 79%, 80%, 81%, 82%, 83%, 84%, 85%, 86%, 87%, 88%, 89%, 90%, 91%, 92%, 93%, 94%, 95%, 96%, 97%, 98%, 99%, or 100%) sequence homology thereto. In some embodiments, the ALK-AGAP1 fusion polypeptide of the disclosure comprises the amino acid sequence of SEQ ID NO: 63, or an amino acid sequence having at least about 70% (e.g., any of about 70%, 71%, 72%, 73%, 74%, 75%, 76%, 77%, 78%, 79%, 80%, 81%, 82%, 83%, 84%, 85%, 86%, 87%, 88%, 89%, 90%, 91%, 92%, 93%, 94%, 95%, 96%, 97%, 98%, 99%, or 100%) sequence homology thereto. In some embodiments, the ALK-MED13L fusion polypeptide of the disclosure comprises the amino acid sequence of SEQ ID NO: 64, or an amino acid sequence having at least about 70% (e.g., any of about 70%, 71%, 72%, 73%, 74%, 75%, 76%, 77%, 78%, 79%, 80%, 81%, 82%, 83%, 84%, 85%, 86%, 87%, 88%, 89%, 90%, 91%, 92%, 93%, 94%, 95%, 96%, 97%, 98%, 99%, or 100%) sequence homology thereto. In some embodiments, the ALK-MTBP fusion polypeptide of the disclosure comprises the amino acid sequence of SEQ ID NO: 65, or an amino acid sequence having at least about 70% (e.g., any of about 70%, 71%, 72%, 73%, 74%, 75%, 76%, 77%, 78%, 79%, 80%, 81%, 82%, 83%, 84%, 85%, 86%, 87%, 88%, 89%, 90%, 91%, 92%, 93%, 94%, 95%, 96%, 97%, 98%, 99%, or 100%) sequence homology thereto. In some embodiments, the ALK-SLC30A6 fusion polypeptide of the disclosure comprises the amino acid sequence of SEQ ID NO: 67, or an amino acid sequence having at least about 70% (e.g., any of about 70%, 71%, 72%, 73%, 74%, 75%, 76%, 77%, 78%, 79%, 80%, 81%, 82%, 83%, 84%, 85%, 86%, 87%, 88%, 89%, 90%, 91%, 92%, 93%, 94%, 95%, 96%, 97%, 98%, 99%, or 100%) sequence homology thereto. In some embodiments, the ALK-GMCL1 fusion polypeptide of the disclosure comprises the amino acid sequence of SEQ ID NO: 68, or an amino acid sequence having at least about 70% (e.g., any of about 70%, 71%, 72%, 73%, 74%, 75%, 76%, 77%, 78%, 79%, 80%, 81%, 82%, 83%, 84%, 85%, 86%, 87%, 88%, 89%, 90%, 91%, 92%, 93%, 94%, 95%, 96%, 97%, 98%, 99%, or 100%) sequence homology thereto. In some embodiments, the ALK-AGAP1 fusion polypeptide of the disclosure comprises the amino acid sequence of SEQ ID NO: 69, or an amino acid sequence having at least about 70% (e.g., any of about 70%, 71%, 72%, 73%, 74%, 75%, 76%, 77%, 78%, 79%, 80%, 81%, 82%, 83%, 84%, 85%, 86%, 87%, 88%, 89%, 90%, 91%, 92%, 93%, 94%, 95%, 96%, 97%, 98%, 99%, or 100%) sequence homology thereto. In some embodiments, the ALK-ZNF454 fusion polypeptide of the disclosure comprises the amino acid sequence of SEQ ID NO: 70, or an amino acid sequence having at least about 70% (e.g., any of about 70%, 71%, 72%, 73%, 74%, 75%, 76%, 77%, 78%, 79%, 80%, 81%, 82%, 83%, 84%, 85%, 86%, 87%, 88%, 89%, 90%, 91%, 92%, 93%, 94%, 95%, 96%, 97%, 98%, 99%, or 100%) sequence homology thereto. In some embodiments, the ALK-TTC28 fusion polypeptide of the disclosure comprises the amino acid sequence of SEQ ID NO: 71, or an amino acid sequence having at least about 70% (e.g., any of about 70%, 71%, 72%, 73%, 74%, 75%, 76%, 77%, 78%, 79%, 80%, 81%, 82%, 83%, 84%, 85%, 86%, 87%, 88%, 89%, 90%, 91%, 92%, 93%, 94%, 95%, 96%, 97%, 98%, 99%, or 100%) sequence homology thereto. In some embodiments, the ALK-NINJ2 fusion polypeptide of the disclosure comprises the amino acid sequence of SEQ ID NO: 72, or an amino acid sequence having at least about 70% (e.g., any of about 70%, 71%, 72%, 73%, 74%, 75%, 76%, 77%, 78%, 79%, 80%, 81%, 82%, 83%, 84%, 85%, 86%, 87%, 88%, 89%, 90%, 91%, 92%, 93%, 94%, 95%, 96%, 97%, 98%, 99%, or 100%) sequence homology thereto. In some embodiments, the ALK-UTRN fusion polypeptide of the disclosure comprises the amino acid sequence of SEQ ID NO: 73, or an amino acid sequence having at least about 70% (e.g., any of about 70%, 71%, 72%, 73%, 74%, 75%, 76%, 77%, 78%, 79%, 80%, 81%, 82%, 83%, 84%, 85%, 86%, 87%, 88%, 89%, 90%, 91%, 92%, 93%, 94%, 95%, 96%, 97%, 98%, 99%, or 100%) sequence homology thereto. In some embodiments, the ALK-ACTN4 fusion polypeptide of the disclosure comprises the amino acid sequence of SEQ ID NO: 74, or an amino acid sequence having at least about 70% (e.g., any of about 70%, 71%, 72%, 73%, 74%, 75%, 76%, 77%, 78%, 79%, 80%, 81%, 82%, 83%, 84%, 85%, 86%, 87%, 88%, 89%, 90%, 91%, 92%, 93%, 94%, 95%, 96%, 97%, 98%, 99%, or 100%) sequence homology thereto. In some embodiments, the ALK-CPSF7 fusion polypeptide of the disclosure comprises the amino acid sequence of SEQ ID NO: 75, or an amino acid sequence having at least about 70% (e.g., any of about 70%, 71%, 72%, 73%, 74%, 75%, 76%, 77%, 78%, 79%, 80%, 81%, 82%, 83%, 84%, 85%, 86%, 87%, 88%, 89%, 90%, 91%, 92%, 93%, 94%, 95%, 96%, 97%, 98%, 99%, or 100%) sequence homology thereto. In some embodiments, the ALK-SLC25A13 fusion polypeptide of the disclosure comprises the amino acid sequence of SEQ ID NO: 76, or an amino acid sequence having at least about 70% (e.g., any of about 70%, 71%, 72%, 73%, 74%, 75%, 76%, 77%, 78%, 79%, 80%, 81%, 82%, 83%, 84%, 85%, 86%, 87%, 88%, 89%, 90%, 91%, 92%, 93%, 94%, 95%, 96%, 97%, 98%, 99%, or 100%) sequence homology thereto. In some embodiments, the ALK-CTNND1 fusion polypeptide of the disclosure comprises the amino acid sequence of SEQ ID NO: 77, or an amino acid sequence having at least about 70% (e.g., any of about 70%, 71%, 72%, 73%, 74%, 75%, 76%, 77%, 78%, 79%, 80%, 81%, 82%, 83%, 84%, 85%, 86%, 87%, 88%, 89%, 90%, 91%, 92%, 93%, 94%, 95%, 96%, 97%, 98%, 99%, or 100%) sequence homology thereto. In some embodiments, the ALK-KLC4 fusion polypeptide of the disclosure comprises the amino acid sequence of SEQ ID NO: 78, or an amino acid sequence having at least about 70% (e.g., any of about 70%, 71%, 72%, 73%, 74%, 75%, 76%, 77%, 78%, 79%, 80%, 81%, 82%, 83%, 84%, 85%, 86%, 87%, 88%, 89%, 90%, 91%, 92%, 93%, 94%, 95%, 96%, 97%, 98%, 99%, or 100%) sequence homology thereto. In some embodiments, the ALK-BTBD9 fusion polypeptide of the disclosure comprises the amino acid sequence of SEQ ID NO: 79, or an amino acid sequence having at least about 70% (e.g., any of about 70%, 71%, 72%, 73%, 74%, 75%, 76%, 77%, 78%, 79%, 80%, 81%, 82%, 83%, 84%, 85%, 86%, 87%, 88%, 89%, 90%, 91%, 92%, 93%, 94%, 95%, 96%, 97%, 98%, 99%, or 100%) sequence homology thereto. In some embodiments, the ALK-CPQ fusion polypeptide of the disclosure comprises the amino acid sequence of SEQ ID NO: 81, or an amino acid sequence having at least about 70% (e.g., any of about 70%, 71%, 72%, 73%, 74%, 75%, 76%, 77%, 78%, 79%, 80%, 81%, 82%, 83%, 84%, 85%, 86%, 87%, 88%, 89%, 90%, 91%, 92%, 93%, 94%, 95%, 96%, 97%, 98%, 99%, or 100%) sequence homology thereto. In some embodiments, the ALK-KIFSC fusion polypeptide of the disclosure comprises the amino acid sequence of SEQ ID NO: 83, or an amino acid sequence having at least about 70% (e.g., any of about 70%, 71%, 72%, 73%, 74%, 75%, 76%, 77%, 78%, 79%, 80%, 81%, 82%, 83%, 84%, 85%, 86%, 87%, 88%, 89%, 90%, 91%, 92%, 93%, 94%, 95%, 96%, 97%, 98%, 99%, or 100%) sequence homology thereto. In some embodiments, the ALK-MAGOHB fusion polypeptide of the disclosure comprises the amino acid sequence of SEQ ID NO: 84, or an amino acid sequence having at least about 70% (e.g., any of about 70%, 71%, 72%, 73%, 74%, 75%, 76%, 77%, 78%, 79%, 80%, 81%, 82%, 83%, 84%, 85%, 86%, 87%, 88%, 89%, 90%, 91%, 92%, 93%, 94%, 95%, 96%, 97%, 98%, 99%, or 100%) sequence homology thereto. In some embodiments, the ALK-COL3A1 fusion polypeptide of the disclosure comprises the amino acid sequence of SEQ ID NO: 86, or an amino acid sequence having at least about 70% (e.g., any of about 70%, 71%, 72%, 73%, 74%, 75%, 76%, 77%, 78%, 79%, 80%, 81%, 82%, 83%, 84%, 85%, 86%, 87%, 88%, 89%, 90%, 91%, 92%, 93%, 94%, 95%, 96%, 97%, 98%, 99%, or 100%) sequence homology thereto.

(iii) Cancers and Methods Related Thereto

[0246] Certain aspects of the present disclosure relate to methods for identifying an individual having a cancer who may benefit from a treatment comprising an anti-cancer therapy; selecting a treatment for an individual having a cancer; identifying one or more treatment options for an individual having a cancer; predicting survival of an individual having a cancer; treating or delaying progression of cancer; monitoring, evaluating or screening an individual having a cancer; assessing a fusion nucleic acid molecule or polypeptide in a cancer in an individual; detecting the presence or absence of a cancer in an individual; monitoring progression or recurrence of a cancer in an individual; or identifying a candidate treatment for a cancer in an individual in need thereof.

[0247] In some embodiments of any of the methods provided herein, the methods comprise acquiring knowledge of or detecting in a sample from an individual having cancer, suspected of having cancer, being tested for cancer, or being treated for cancer, an ALK fusion nucleic acid molecule of the disclosure, e.g., an ALK fusion nucleic acid molecule described above, in Tables 1-7 and 9, and/or in the Examples herein, such as an ALK-ABCB11, ALK-ACTN4, ALK-AGAP1, ALK-APH1A, ALK-AZI2, ALK-BTBD9, ALK-C2orf73, ALK-CAPN14, ALK-CARMIL1, ALK-CASP8, ALK-CDC42BPA, ALK-CIB4, ALK-CNTNAP5, ALK-COL3A1, ALK-CPQ, ALK-CPSF7, ALK-CREBBP, ALK-CTBP1, ALK-CTNND1, ALK-CYP51A1, ALK-CYS1, ALK-EPHA2, ALK-FHOD3, ALK-FILIP1L, ALK-GMCL1, ALK-GPN1, ALK-GPR113, ALK-HADHA, ALK-HS1BP3, ALK-INTS9, ALK-ITGA6, ALK-KCTD18, ALK-KIFSC, ALK-KLC4, ALK-LINC00535, ALK-LRRFIP2, ALK-MAGOHB, ALK-MAMDC4, ALK-MANBA, ALK-MAP3K9, ALK-MED13L, ALK-METTL25, ALK-MTBP, ALK-MYH10, ALK-MYOSC, ALK-NFIA, ALK-NINJ2, ALK-OPRM1, ALK-OTX1, ALK-PAQR4, ALK-PDCD10, ALK-PDE3A, ALK-PELI1, ALK-PLEC, ALK-PTGER4, ALK-PTPRJ, ALK-QKI, ALK-RPS6KA5, ALK-SASH1, ALK-SEC16B, ALK-SKAP1, ALK-SLC25A13, ALK-SLC30A6, ALK-SNX17, ALK-SOX13, ALK-SRSF7, ALK-TANGO6, ALK-TG, ALK-TMCO3, ALK-TNS3, ALK-TRIM24, ALK-TTC28, ALK-UBE2L3, ALK-UBE3B, ALK-UTRN, ALK-VASP, ALK-WDR92, ALK-YPEL5, ALK-ZNF446, ALK-ZNF454, ALK-ZNF513, or ALK-ZSWIM2 fusion nucleic acid molecule described herein. In other embodiments, the methods comprise acquiring knowledge of or detecting in a sample from an individual having cancer, suspected of having cancer, being tested for cancer, or being treated for cancer, an ALK fusion polypeptide of the disclosure, e.g., an ALK fusion polypeptide described above, and/or in Table 8, and/or in the Examples herein, such as an ALK-ABCB11, ALK-ACTN4, ALK-AGAP1, ALK-APH1A, ALK-AZI2, ALK-BTBD9, ALK-C2orf73, ALK-CAPN14, ALK-CARMIL1, ALK-CASP8, ALK-CDC42BPA, ALK-CIB4, ALK-CNTNAP5, ALK-COL3A1, ALK-CPQ, ALK-CPSF7, ALK-CREBBP, ALK-CTBP1, ALK-CTNND1, ALK-CYP51A1, ALK-CYS1, ALK-EPHA2, ALK-FHOD3, ALK-FILIP1L, ALK-GMCL1, ALK-GPN1, ALK-GPR113, ALK-HADHA, ALK-HS1BP3, ALK-INTS9, ALK-ITGA6, ALK-KCTD18, ALK-KIF5C, ALK-KLC4, ALK-LINC00535, ALK-LRRFIP2, ALK-MAGOHB, ALK-MAMDC4, ALK-MANBA, ALK-MAP3K9, ALK-MED13L, ALK-METTL25, ALK-MTBP, ALK-MYH10, ALK-MYO5C, ALK-NFIA, ALK-NINJ2, ALK-OPRM1, ALK-OTX1, ALK-PAQR4, ALK-PDCD10, ALK-PDE3A, ALK-PELI1, ALK-PLEC, ALK-PTGER4, ALK-PTPRJ, ALK-QKI, ALK-RPS6KA5, ALK-SASH1, ALK-SEC16B, ALK-SKAP1, ALK-SLC25A13, ALK-SLC30A6, ALK-SNX17, ALK-SOX13, ALK-SRSF7, ALK-TANGO6, ALK-TG, ALK-TMCO3, ALK-TNS3, ALK-TRIM24, ALK-TTC28, ALK-UBE2L3, ALK-UBE3B, ALK-UTRN, ALK-VASP, ALK-WDR92, ALK-YPEL5, ALK-ZNF446, ALK-ZNF454, ALK-ZNF513, or ALK-ZSWIM2 fusion polypeptide described herein.

[0248] In some embodiments of any of the methods provided herein, detection of an ALK fusion nucleic acid molecule or polypeptide of the disclosure in a sample from an individual (e.g., an individual having cancer, suspected of having cancer, being tested for cancer, or being treated for cancer) identifies the individual as one who may benefit from a treatment comprising an anti-cancer therapy, such as an anti-cancer therapy provided herein, e.g., an ALK-targeted therapy.

[0249] In some embodiments, the methods comprise detecting, in a first sample obtained from the individual at a first time point, the presence or absence of an ALK fusion nucleic acid molecule or polypeptide of the disclosure. In some embodiments, the methods further comprise detecting, in a second sample obtained from the individual at a second time point after the first time point, the presence or absence of an ALK fusion nucleic acid molecule or polypeptide of the disclosure. In some embodiments, the methods further comprise providing an assessment of cancer progression or cancer recurrence in the individual based, at least in part, on the presence or absence of the ALK fusion nucleic acid molecule or polypeptide in the first sample and/or in the second sample. In some embodiments, the presence of the ALK fusion nucleic acid molecule or polypeptide in the first sample and/or in the second sample identifies the individual as having increased risk of cancer progression or cancer recurrence. In some embodiments, the methods further comprise selecting a treatment, administering a treatment, adjusting a treatment, adjusting the dose of a treatment, or applying a treatment to the individual based, at least in part, on detecting the presence of the ALK fusion nucleic acid molecule or polypeptide in the first sample and/or in the second sample, wherein the treatment comprises an anti-cancer therapy, such as an anti-cancer therapy provided herein, e.g., an ALK-targeted therapy.

[0250] In some embodiments, the methods comprise performing DNA sequencing on a sample obtained from an individual (e.g., an individual having cancer, suspected of having cancer, being tested for cancer, or being treated for cancer) to determine a sequencing mutation profile on a group of genes comprising one or more of ALK, ABCB11, ACTN4, AGAP1, APH1A, AZI2, BTBD9, C2orf73, CAPN14, CARMIL1, CASP8, CDC42BPA, CIB4, CNTNAP5, COL3A1, CPQ, CPSF7, CREBBP, CTBP1, CTNND1, CYP51A1, CYS1, EPHA2, FHOD3, FILIP1L, GMCL1, GPN1, GPR113, HADHA, HS1BP3, INTS9, ITGA6, KCTD18, KIF5C, KLC4, LINC00535, LRRFIP2, MAGOHB, MAMDC4, MANBA, MAP3K9, MED13L, METTL25, MTBP, MYH10, MYO5C, NFIA, NINJ2, OPRM1, OTX1, PAQR4, PDCD10, PDE3A, PELI1, PLEC, PTGER4, PTPRJ, QKI, RPS6KA5, SASH1, SEC16B, SKAP1, SLC25A13, SLC30A6, SNX17, SOX13, SRSF7, TANGO6, TG, TMCO3, TNS3, TRIM24, TTC28, UBE2L3, UBE3B, UTRN, VASP, WDR92, YPEL5, ZNF446, ZNF454, ZNF513, or ZSWIM2, or a gene listed in Table 1, or any combination thereof, wherein the sequencing mutation profile identifies the presence or absence of an ALK fusion nucleic acid molecule of the disclosure. In some embodiments, the methods further comprise identifying a candidate treatment for a cancer in an individual, based at least in part on the sequencing mutation profile. In some embodiments, the candidate treatment comprises an anti-cancer therapy, such as an anti-cancer therapy provided herein, e.g., an ALK-targeted therapy. In some embodiments, the sequencing mutation profile identifies the presence or absence of a fragment of the ALK fusion nucleic acid molecule, wherein the fragment comprises a breakpoint or fusion junction, e.g., one or more of the corresponding breakpoints described herein. In some embodiments, the presence of the ALK fusion nucleic acid molecule in the sample identifies the individual as one who may benefit from a treatment comprising an anti-cancer therapy, e.g., an anti-cancer therapy provided herein, such as an ALK-targeted therapy. In some embodiments, the presence of the ALK fusion nucleic acid molecule in the sample predicts the individual to have longer survival when treated with a treatment comprising an anti-cancer therapy, e.g., an ALK-targeted therapy, as compared to survival of an individual whose cancer does not comprise the ALK fusion nucleic acid molecule.

[0251] In some embodiments of any of the methods provided herein, the methods further comprise generating a report comprising one or more treatment options identified for the individual based at least in part on detection of the ALK fusion nucleic acid molecule or polypeptide in the sample, wherein the one or more treatment options comprise an anti-cancer therapy, such as an anti-cancer therapy provided herein, e.g., an ALK-targeted therapy.

[0252] In some embodiments of any of the methods provided herein, responsive to acquisition of knowledge of an ALK fusion nucleic acid molecule or polypeptide of the disclosure in a sample from an individual (e.g., an individual having cancer, suspected of having cancer, being tested for cancer, or being treated for cancer): (i) the individual is classified as a candidate to receive a treatment comprising an anti-cancer therapy, such as an anti-cancer therapy provided herein, e.g., an ALK-targeted therapy; and/or (ii) the individual is identified as likely to respond to a treatment that comprises an anti-cancer therapy, such as an anti-cancer therapy provided herein, e.g., an ALK-targeted therapy. In some embodiments, responsive to acquisition of knowledge of the ALK fusion nucleic acid molecule or polypeptide in a sample from the individual, the individual is predicted to have longer survival when treated with a treatment comprising an anti-cancer therapy, such as an anti-cancer therapy provided herein, e.g., an ALK-targeted therapy, as compared to survival of an individual whose cancer does not comprise or exhibit the ALK fusion nucleic acid molecule or polypeptide. In some embodiments, responsive to acquisition of knowledge of the ALK fusion nucleic acid molecule or polypeptide in a sample from the individual, the individual is predicted to have resistance to an anti-cancer therapy (e.g., a non-ALK-targeted therapy, and/or a prior anti-cancer therapy administered to the individual), the individual is predicted to respond to an anti-cancer therapy (e.g., an anti-cancer therapy provided herein, such as an ALK-targeted therapy), and/or the individual is predicted to have poor prognosis, e.g., when treated with a non-ALK-targeted therapy, as compared to an individual whose cancer does not comprise the fusion nucleic acid molecule or polypeptide.

[0253] In some embodiments, responsive to acquisition of knowledge of an ALK fusion nucleic acid molecule or polypeptide of the disclosure in a sample from an individual (e.g., an individual having cancer, suspected of having cancer, being tested for cancer, or being treated for cancer), the methods comprise administering to the individual an effective amount of a treatment that comprises an anti-cancer therapy, such as an anti-cancer therapy provided herein, e.g., an ALK-targeted therapy.

[0254] In some embodiments of any of the methods provided herein, the methods further comprise generating a report comprising one or more treatment options identified for the individual based, at least in part, on knowledge of an ALK fusion nucleic acid molecule or polypeptide of the disclosure in a sample from the individual, wherein the one or more treatment options comprise an anti-cancer therapy, such as an anti-cancer therapy provided herein, e.g., an ALK targeted therapy.

[0255] In some embodiments, acquiring knowledge of an ALK fusion nucleic acid molecule or polypeptide of the disclosure in a sample comprises detecting the ALK fusion nucleic acid molecule or polypeptide in the sample. In some embodiments of any of the methods provided herein, detecting an ALK fusion nucleic acid molecule of the disclosure comprises detecting a fragment of the fusion nucleic acid molecule comprising a breakpoint or fusion junction, e.g., one or more of the corresponding breakpoints described herein. In some embodiments of any of the methods provided herein, detecting an ALK fusion polypeptide of the disclosure comprises detecting a portion of the fusion polypeptide that is encoded by a fragment of an ALK fusion nucleic acid molecule that comprises a breakpoint or a fusion junction, e.g., one or more of the corresponding breakpoints described herein. In some embodiments of any of the methods provided herein, detecting an ALK fusion polypeptide of the disclosure comprises detecting a portion of the fusion polypeptide that comprises the fusion between the ALK polypeptide, or the portion thereof, and the polypeptide encoded by the other gene in the fusion, or the portion thereof.

[0256] In some embodiments, the methods of the disclosure further comprise providing an assessment of the ALK fusion nucleic acid molecule or polypeptide of the disclosure.

[0257] In some embodiments of any of the methods provided herein, the anti-cancer therapy in an ALK-targeted therapy. In some embodiments, the ALK-targeted therapy is a small molecule inhibitor, an antibody, a cellular therapy, a nucleic acid, a virus-based therapy, an antibody-drug conjugate, a recombinant protein, a fusion protein, a natural compound, a peptide, a PROteolysis-TArgeting Chimera (PROTAC), a treatment for cancer comprising an ALK fusion nucleic acid molecule or polypeptide, a treatment for ALK-positive or ALK-rearranged cancer, an ALK-targeted therapy being tested in a clinical trial, a treatment for cancer being tested in a clinical trial, a targeted therapy, a treatment being tested in a clinical trial for cancer comprising an ALK fusion nucleic acid molecule or polypeptide, or any combination thereof, e.g., a described in further detail below. In some embodiments, the ALK-targeted therapy is a kinase inhibitor, such as a kinase inhibitor described herein or known in the art. In some embodiments, the ALK-targeted therapy is a tyrosine kinase inhibitor described herein or known in the art. In some embodiments, the ALK-targeted therapy is a kinase inhibitor that inhibits the kinase activity of an ALK polypeptide. In some embodiments, the ALK-targeted therapy is a multi-kinase inhibitor or an ALK-specific inhibitor. In some embodiments, the ALK-targeted therapy comprises one or more of crizotinib, alectinib, ceritinib, lorlatinib, brigatinib, ensartinib (X-396), repotrectinib (TPX-005), entrectinib (RXDX-101), AZD3463, CEP-37440, belizatinib (TSR-011), ASP3026, KRCA-0008, TQ-B3139, TPX-0131, TAE684 (NVP-TAE684), CT-707 (see, e.g., clinicaltrials.gov/ct2/show/NCT02695550), WX-0593 (see, e.g., clinicaltrials.gov/ct2/show/NCT04641754), alkotinib (see, e.g., clinicaltrials.gov/ct2/show/NCTO4211922), SIM1803-1A (see, e.g., clinicaltrials.gov/ct2/show/NCT04671849), PLB1003 (see, e.g., clinicaltrials.gov/ct2/show/NCT03130881), SAF-189s (see, e.g., clinicaltrials.gov/ct2/show/NCT04237805), PF03446962 (see, e.g., clinicaltrials.gov/ct2/show/NCT01620970), TQ-B3101 (see, e.g., clinicaltrials.gov/ct2/show/NCT04412564), APG-2449 (see, e.g., clinicaltrials.gov/ct2/show/NCT03917043), X-376 (see, e.g., Awad et al., Clinical advances in hematology & oncology: H&O vol. 12, 7 (2014):429-39), CEP-28122 (see, e.g., Cheng et al., Molecular cancer therapeutics vol. 11, 3 (2012): 670-9; and Spagnuolo et al., Expert opinion on emerging drugs vol. 23, 3 (2018): 231-241), and GSK1838705A (see, e.g., Sabbatini, Peter et al., Molecular cancer therapeutics vol. 8, 10 (2009): 2811-20). In some embodiments, the ALK-targeted therapy inhibits the expression of an ALK fusion nucleic acid molecule or polypeptide of the disclosure. In some embodiments, the cellular therapy is an adoptive therapy, a T cell-based therapy, a natural killer (NK) cell-based therapy, a chimeric antigen receptor (CAR)-T cell therapy, a recombinant T cell receptor (TCR) T cell therapy, a macrophage-based therapy, an induced pluripotent stem cell-based therapy, a B cell-based therapy, or a dendritic cell (DC)-based therapy. In some embodiments, the nucleic acid inhibits the expression of an ALK fusion nucleic acid molecule or polypeptide of the disclosure. In some embodiments, the nucleic acid comprises a double-stranded RNA (dsRNA), a small interfering RNA (siRNA), or a small hairpin RNA (shRNA), e.g., as described herein. In some embodiments, the ALK-targeted therapy is a first-line or front-line treatment for cancer.

[0258] In some embodiments of any of the methods provided herein, the methods further comprise acquiring knowledge of or detecting in a sample from an individual (e.g., an individual having cancer, suspected of having cancer, being tested for cancer, or being treated for cancer) a base substitution, a short insertion/deletion (indel), a copy number alteration, or a genomic rearrangement in one or more genes. In some embodiments, the one or more genes comprise one or more of ALK, ABCB11, ACTN4, AGAP1, APH1A, AZI2, BTBD9, C2orf73, CAPN14, CARMIL1, CASP8, CDC42BPA, CIB4, CNTNAP5, COL3A1, CPQ, CPSF7, CREBBP, CTBP1, CTNND1, CYP51A1, CYS1, EPHA2, FHOD3, FILIP1L, GMCL1, GPN1, GPR113, HADHA, HS1BP3, INTS9, ITGA6, KCTD18, KIF5C, KLC4, LINC00535, LRRFIP2, MAGOHB, MAMDC4, MANBA, MAP3K9, MED13L, METTL25, MTBP, MYH10, MYO5C, NFIA, NINJ2, OPRM1, OTX1, PAQR4, PDCD10, PDE3A, PELI1, PLEC, PTGER4, PTPRJ, QKI, RPS6KA5, SASH1, SEC16B, SKAP1, SLC25A13, SLC30A6, SNX17, SOX13, SRSF7, TANGO6, TG, TMCO3, TNS3, TRIM24, TTC28, UBE2L3, UBE3B, UTRN, VASP, WDR92, YPEL5, ZNF446, ZNF454, ZNF513, or ZSWIM2, or a gene listed in Table 1, or a panel of known/suspected oncogenes and/or tumor suppressors, or any combination thereof.

[0259] In some embodiments of any of the methods provided herein, the treatment or the one or more treatment options, e.g., the ALK-targeted therapy, further comprise an additional anti-cancer therapy, e.g., an ALK-targeted therapy in combination with an additional anti-cancer therapy. In some embodiments of any of the methods provided herein, the treatment or the one or more treatment options, e.g., the ALK-targeted therapy, further comprise administering an additional anti-cancer therapy to the individual, e.g., administering an ALK-targeted therapy in combination with an additional anti-cancer therapy. In some embodiments, the additional anti-cancer therapy is any anti-cancer therapy known in the art or described herein. In some embodiments, the additional anti-cancer therapy comprises one or more of a small molecule inhibitor, a chemotherapeutic agent, a cancer immunotherapy, an antibody, a cellular therapy, a nucleic acid, a surgery, a radiotherapy, an anti-angiogenic therapy, an anti-DNA repair therapy, an anti-inflammatory therapy, an anti-neoplastic agent, a growth inhibitory agent, a cytotoxic agent, a vaccine, a small molecule agonist, a virus-based therapy, an antibody-drug conjugate, a recombinant protein, a fusion protein, a natural compound, a peptide, a PROteolysis-TArgeting Chimera (PROTAC), or any combination thereof. In some embodiments, the additional anti-cancer therapy is an immunotherapy, such as an immune checkpoint inhibitor. In some embodiments, the additional anti-cancer therapy is a PD-1-, a CTLA4-, or a PD-L1-targeted agent. In some embodiments, the additional anti-cancer therapy is a heat shock protein 90 inhibitor (Golding et al., Molecular cancer vol. 17, 1 52, 2018; Pall, Current opinion in oncology vol. 27, 2 (2015):118-24), an EGFR inhibitor (Golding et al., Molecular cancer vol. 17, 1 52, 2018), a SHP2 inhibitor (Dardaei et al., Nature medicine vol. 24, 4 (2018): 512-517), a MEK inhibitor (Shrestha et al., Scientific reports vol. 9, 1 18842, 2019; Shrestha et al., The Journal of pharmacology and experimental therapeutics vol. 374, 1 (2020):134-140), an IGF-1R inhibitor (George, Journal of hematology & oncology vol. 12, 1 80, 2019), a vascular endothelial growth factor (VEGF)-targeted therapy (Makimoto et al., Acta medica Okayama vol. 74, 5 (2020): 371-379; Gristina et al., Pharmaceuticals (Basel, Switzerland) vol. 13, 12 474, 2020), an mTOR inhibitor (Kim et al., Anticancer research vol. 40, 3 (2020): 1395-1403), or any combination thereof.

[0260] In some embodiments, the individual has been previously treated, or is being treated, for cancer with a treatment for cancer, e.g., an anti-cancer therapy described herein or any other anti-cancer therapy or treatment known in the art. In some embodiments, the individual has been previously treated, or is being treated, for cancer with a kinase inhibitor. In some embodiments, an ALK fusion nucleic acid molecule and/or an ALK fusion polypeptide of the disclosure confer resistance of a cancer to a treatment for cancer, e.g., a prior treatment for cancer. In some embodiments, the cancer progressed on a prior treatment, such as a kinase inhibitor. In some embodiments, the individual has not been previously treated for cancer. In some embodiments, the individual, or the cancer, has not been previously treated with a kinase inhibitor. In some embodiments, the individual, or the cancer, is kinase inhibitor naïve.

[0261] In some embodiments of any of the methods provided herein, the cancer is a carcinoma, a sarcoma, a lymphoma, a leukemia, a myeloma, a germ cell cancer, or a blastoma. In some embodiments, the cancer is a solid tumor. In some embodiments, the cancer is a hematologic malignancy. In some embodiments, the cancer is a B cell cancer, a melanoma, breast cancer, lung cancer, bronchus cancer, colorectal cancer, prostate cancer, pancreatic cancer, stomach cancer, ovarian cancer, urinary bladder cancer, brain cancer, central nervous system cancer, peripheral nervous system cancer, esophageal cancer, cervical cancer, uterine cancer, endometrial cancer, cancer of an oral cavity, cancer of a pharynx, liver cancer, kidney cancer, testicular cancer, biliary tract cancer, small bowel cancer, appendix cancer, salivary gland cancer, thyroid gland cancer, adrenal gland cancer, osteosarcoma, chondrosarcoma, a cancer of hematological tissue, an adenocarcinoma, an inflammatory myofibroblastic tumor, a gastrointestinal stromal tumor (GIST), colon cancer, multiple myeloma (MM), myelodysplastic syndrome (MDS), myeloproliferative disorder (MPD), acute lymphocytic leukemia (ALL), acute myelocytic leukemia (AML), chronic myelocytic leukemia (CML), chronic lymphocytic leukemia (CLL), polycythemia Vera, Hodgkin lymphoma, non-Hodgkin lymphoma (NHL), soft-tissue sarcoma, fibrosarcoma, myxosarcoma, liposarcoma, osteogenic sarcoma, chordoma, angiosarcoma, endotheliosarcoma, lymphangiosarcoma, lymphangioendotheliosarcoma, synovioma, mesothelioma, Ewing's tumor, leiomyosarcoma, rhabdomyosarcoma, squamous cell carcinoma, basal cell carcinoma, adenocarcinoma, sweat gland carcinoma, sebaceous gland carcinoma, papillary carcinoma, papillary adenocarcinomas, medullary carcinoma, bronchogenic carcinoma, renal cell carcinoma, hepatoma, bile duct carcinoma, choriocarcinoma, seminoma, embryonal carcinoma, Wilms' tumor, bladder carcinoma, epithelial carcinoma, glioma, astrocytoma, medulloblastoma, craniopharyngioma, ependymoma, pinealoma, hemangioblastoma, acoustic neuroma, oligodendroglioma, meningioma, neuroblastoma, retinoblastoma, follicular lymphoma, diffuse large B-cell lymphoma, mantle cell lymphoma, hepatocellular carcinoma, thyroid cancer, gastric cancer, head and neck cancer, small cell cancer, essential thrombocythemia, agnogenic myeloid metaplasia, hypereosinophilic syndrome, systemic mastocytosis, familiar hypereosinophilia, chronic eosinophilic leukemia, neuroendocrine cancers, or a carcinoid tumor. In some embodiments, the cancer is a non-small cell lung carcinoma, a leiomyosarcoma, a thyroid carcinoma, a colorectal cancer, a pancreatic cancer, or a malignant peritoneal mesothelioma. In some embodiments, the cancer is anus squamous cell carcinoma, brain glioblastoma (GBM), breast cancer (NOS), breast carcinoma (NOS), breast invasive ductal carcinoma (IDC), colon adenocarcinoma (CRC), esophagus adenocarcinoma, fallopian tube serous carcinoma, gallbladder adenocarcinoma, gallbladder carcinoma, gastroesophageal junction adenocarcinoma, lung adenocarcinoma, lung non-small cell lung carcinoma (NOS), lymph node Castleman's disease, lymph node lymphoma t-cell (NOS), ovary clear cell carcinoma, ovary endometrioid adenocarcinoma, ovary epithelial carcinoma (NOS), ovary high grade serous carcinoma, ovary serous carcinoma, pancreas cancer (NOS), pancreas ductal adenocarcinoma, pediatric bone osteosarcoma, pediatric skin melanoma, pediatric soft tissue sarcoma (NOS), pediatric soft tissue sarcoma undifferentiated, peritoneum serous carcinoma, prostate acinar adenocarcinoma, skin melanoma, small intestine adenocarcinoma, soft tissue leiomyosarcoma, soft tissue liposarcoma, soft tissue sarcoma (NOS), soft tissue sarcoma undifferentiated, thyroid papillary carcinoma, unknown primary adenocarcinoma, unknown primary carcinoma (NOS), unknown primary malignant neoplasm (NOS), unknown primary myoepithelial carcinoma, uterus carcinosarcoma, uterus endometrial adenocarcinoma endometrioid, uterus leiomyosarcoma, or vulva squamous cell carcinoma (SCC).

[0262] In some embodiments, the methods further comprise detecting the presence or absence of a cancer in a sample from the individual. In some embodiments, the methods further comprise administering an effective amount of anti-cancer therapy to the individual, e.g., an anti-cancer therapy described herein, such as an ALK-targeted therapy.

[0263] In some embodiments, any of the cancers described herein comprise any of the ALK fusion nucleic acid molecules of the disclosure, e.g., an ALK fusion nucleic acid molecule described above and/or in the Examples herein. In other embodiments, any of the cancers described herein comprise any of the ALK fusion polypeptides of the disclosure, e.g., an ALK fusion polypeptide described above and/or in the Examples herein. In some embodiments, the methods provided herein comprise acquiring knowledge of or detecting any of the ALK fusion nucleic acid molecules of the disclosure in a sample from an individual having any cancer known in the art, or any of the cancers described herein. In some embodiments, the methods provided herein comprise acquiring knowledge of or detecting any of the ALK fusion polypeptides of the disclosure in a sample from an individual having any cancer known in the art, or any of the cancers described herein. In some embodiments, the cancer is a cancer listed in Table 9, and the ALK fusion nucleic acid molecule is the corresponding ALK fusion nucleic acid molecule or polypeptide as listed in Table 9.

TABLE 9
Cancers and exemplary ALK fusions.

| ALK Fusion Nucleic Acid | |
|---|---|
| Molecule or Polypeptide | Cancer |
| ALK-COL3A1 | Soft tissue sarcoma (NOS) |
| ALK-CDC42BPA | Ovary serous carcinoma |
| ALK-EPHA2 | Colon adenocarcinoma (CRC) |
| ALK-MYO5C | Lung adenocarcinoma |
| ALK-TRIM24 | Lung adenocarcinoma |
| ALK-SKAP1 | Ovary endometrioid adenocarcinoma |
| ALK-UBE3B | Lung adenocarcinoma |
| ALK-TNS3 | Lymph node Castleman's disease |
| ALK-C2orf73 | Lung adenocarcinoma |
| ALK-AZI2 | Gastroesophageal junction adenocarcinoma |
| ALK-MANBA | Lung adenocarcinoma |
| ALK-CNTNAP5 | Lung adenocarcinoma |
| ALK-TANGO6 | Soft tissue sarcoma undifferentiated |
| ALK-NFIA | Soft tissue liposarcoma |
| ALK-RPS6KA5 | Peritoneum serous carcinoma |
| ALK-TG | Thyroid papillary carcinoma |
| ALK-LRRFIP2 | Lung non-small cell lung carcinoma (NOS) |
| ALK-MYO5C | Lung adenocarcinoma |
| ALK-AGAP1 | Unknown primary myoepithelial carcinoma |
| ALK-MED13L | PEDIATRIC Soft tissue sarcoma |
| | undifferentiated |
| ALK-MTBP | Ovary serous carcinoma |
| ALK-SLC30A6 | Lung non-small cell lung carcinoma (NOS) |
| ALK-GMCL1 | Prostate acinar adenocarcinoma |
| ALK-AGAP1 | Lung adenocarcinoma |
| ALK-ZNF454 | Lung non-small cell lung carcinoma (NOS) |
| ALK-TTC28 | Uterus carcinosarcoma |
| ALK-NINJ2 | Breast invasive ductal carcinoma (IDC) |
| ALK-UTRN | Pancreas ductal adenocarcinoma |
| ALK-ACTN4 | Lung adenocarcinoma |
| ALK-CPSF7 | Breast carcinoma (NOS) |
| ALK-SLC25A13 | Lung adenocarcinoma |
| ALK-CTNND1 | Lung adenocarcinoma |
| ALK-KLC4 | Lung adenocarcinoma |
| ALK-BTBD9 | Lung non-small cell lung carcinoma (NOS) |
| ALK-CPQ | Lung non-small cell lung carcinoma (NOS) |
| ALK-KIF5C | Unknown primary carcinoma (NOS) |
| ALK-MAGOHB | Anus squamous cell carcinoma |
| ALK-COL3A1 | Uterus leiomyosarcoma |
| ALK-OPRM1 | Lung adenocarcinoma |
| ALK-GPN1 | Skin melanoma |
| ALK-SEC16B | Esophagus adenocarcinoma |
| ALK-UBE2L3 | Skin melanoma |
| ALK-METTL25 | Lung adenocarcinoma |
| ALK-CYS1 | Lung adenocarcinoma |
| ALK-ABCB11 | Lung non-small cell lung carcinoma (NOS) |
| ALK-INTS9 | Lung adenocarcinoma |
| ALK-CIB4 | Lung adenocarcinoma |
| ALK-WDR92 | Soft tissue leiomyosarcoma |
| ALK-OTX1 | Lung adenocarcinoma |
| ALK-PDCD10 | Breast carcinoma (NOS) |
| ALK-PTGER4 | Prostate acinar adenocarcinoma |
| ALK-PTPRJ | Lung non-small cell lung carcinoma |
| | (NSCLC) (NOS) |
| ALK-ZSWIM2 | Lung adenocarcinoma |
| ALK-FHOD3 | Lung non-small cell lung carcinoma |
| | (NSCLC) (NOS) |
| ALK-FILIP1L | Pancreas ductal adenocarcinoma |
| ALK-ITGA6 | Pancreas cancer (NOS) |
| ALK-KCTD18 | Lung adenocarcinoma |
| ALK-MAMDC4 | Ovary clear cell carcinoma |
| ALK-PELI1 | Breast cancer (NOS) |
| ALK-LINC00535 | Lung non-small cell lung carcinoma (NOS) |
| ALK-CTBP1 | Lung adenocarcinoma |
| ALK-CARMIL1 | Lung adenocarcinoma |
| ALK-ZNF513 | Gallbladder adenocarcinoma |
| ALK-TMCO3 | Unknown primary adenocarcinoma |
| ALK-SRSF7 | Colon adenocarcinoma (CRC) |
| ALK-CASP8 | Vulva squamous cell carcinoma (SCC) |
| ALK-CYP51A1 | Ovary high grade serous carcinoma |
| ALK-GPR113 | Prostate acinar adenocarcinoma |
| ALK-HADHA | Fallopian tube serous carcinoma |
| ALK-LRRFIP2 | Lung adenocarcinoma |
| ALK-MYH10 | PEDIATRIC Soft tissue sarcoma (NOS) |
| ALK-PDE3A | PEDIATRIC Bone osteosarcoma |
| ALK-PLEC | Uterus endometrial adenocarcinoma |
| | endometrioid |
| ALK-QKI | Brain glioblastoma (GBM) |
| ALK-SASH1 | Brain glioblastoma (GBM) |
| ALK-SRSF7 | Pancreas ductal adenocarcinoma |
| ALK-VASP | Ovary clear cell carcinoma |
| ALK-ZNF446 | Ovary serous carcinoma |
| ALK-SOX13 | PEDIATRIC Skin melanoma |
| ALK-YPEL5 | Brain glioblastoma (GBM) |
| ALK-CAPN14 | Small intestine adenocarcinoma |
| ALK-MAP3K9 | Breast carcinoma (NOS) |
| ALK-SNX17 | Prostate acinar adenocarcinoma |
| ALK-HS1BP3 | Lung adenocarcinoma |
| ALK-CREBBP | Ovary serous carcinoma |
| ALK-PAQR4 | Breast carcinoma (NOS) |
| ALK-APH1A | Uterus leiomyosarcoma |

[0264] In some embodiments, the cancer is soft tissue sarcoma (NOS), and the ALK fusion nucleic acid molecule is any of the ALK-COL3A1 fusion nucleic acid molecules described herein or the ALK fusion polypeptide is any of the ALK-COL3A1 fusion polypeptides described herein. In some embodiments, the cancer is ovary serous carcinoma, and the ALK fusion nucleic acid molecule is any of the ALK-CDC42BPA fusion nucleic acid molecules described herein or the ALK fusion polypeptide is any of the ALK-CDC42BPA fusion polypeptides described herein. In some embodiments, the cancer is colon adenocarcinoma (CRC), and the ALK fusion nucleic acid molecule is any of the ALK-EPHA2 fusion nucleic acid molecules described herein or the ALK fusion polypeptide is any of the ALK-EPHA2 fusion polypeptides described herein. In some embodiments, the cancer is lung adenocarcinoma, and the ALK fusion nucleic acid molecule is any of the ALK-MYO5C fusion nucleic acid molecules described herein or the ALK fusion polypeptide is any of the ALK-MYO5C fusion polypeptides described herein. In some embodiments, the cancer is lung adenocarcinoma, and the ALK fusion nucleic acid molecule is any of the ALK-TRIM24 fusion nucleic acid molecules described herein or the ALK fusion polypeptide is any of the ALK-TRIM24 fusion polypeptides described herein. In some embodiments, the cancer is ovary endometrioid adenocarcinoma, and the ALK fusion nucleic acid molecule is any of the ALK-SKAP1 fusion nucleic acid molecules described herein or the ALK fusion polypeptide is any of the ALK-SKAP1 fusion polypeptides described herein. In some embodiments, the cancer is lung adenocarcinoma, and the ALK fusion nucleic acid molecule is any of the ALK-UBE3B fusion nucleic acid molecules described herein or the ALK fusion polypeptide is any of the ALK-UBE3B fusion polypeptides described herein. In some embodiments, the cancer is lymph node Castleman's disease, and the ALK fusion nucleic acid molecule is any of the ALK-TNS3 fusion nucleic acid molecules described herein or the ALK fusion polypeptide is any of the ALK-TNS3 fusion polypeptides described herein. In some embodiments, the cancer is lung adenocarcinoma, and the ALK fusion nucleic acid molecule is any of the ALK-C2orf73 fusion nucleic acid molecules described herein or the ALK fusion polypeptide is any of the ALK-C2orf73 fusion polypeptides described herein. In some embodiments, the cancer is gastroesophageal junction adenocarcinoma, and the ALK fusion nucleic acid molecule is any of the ALK-AZI2 fusion nucleic acid molecules described herein or the ALK fusion polypeptide is any of the ALK-AZI2 fusion polypeptides described herein. In some embodiments, the cancer is lung adenocarcinoma, and the ALK fusion nucleic acid molecule is any of the ALK-MANBA fusion nucleic acid molecules described herein or the ALK fusion polypeptide is any of the ALK-MANBA fusion polypeptides described herein. In some embodiments, the cancer is lung adenocarcinoma, and the ALK fusion nucleic acid molecule is any of the ALK-CNTNAP5 fusion nucleic acid molecules described herein or the ALK fusion polypeptide is any of the ALK-CNTNAP5 fusion polypeptides described herein. In some embodiments, the cancer is soft tissue sarcoma undifferentiated, and the ALK fusion nucleic acid molecule is any of the ALK-TANGO6 fusion nucleic acid molecules described herein or the ALK fusion polypeptide is any of the ALK-TANGO6 fusion polypeptides described herein. In some embodiments, the cancer is soft tissue liposarcoma, and the ALK fusion nucleic acid molecule is any of the ALK-NFIA fusion nucleic acid molecules described herein or the ALK fusion polypeptide is any of the ALK-NFIA fusion polypeptides described herein. In some embodiments, the cancer is peritoneum serous carcinoma, and the ALK fusion nucleic acid molecule is any of the ALK-RPS6KA5 fusion nucleic acid molecules described herein or the ALK fusion polypeptide is any of the ALK-RPS6KA5 fusion polypeptides described herein. In some embodiments, the cancer is thyroid papillary carcinoma, and the ALK fusion nucleic acid molecule is any of the ALK-TG fusion nucleic acid molecules described herein or the ALK fusion polypeptide is any of the ALK-TG fusion polypeptides described herein. In some embodiments, the cancer is lung non-small cell lung carcinoma (NOS), and the ALK fusion nucleic acid molecule is any of the ALK-LRRFIP2 fusion nucleic acid molecules described herein or the ALK fusion polypeptide is any of the ALK-LRRFIP2 fusion polypeptides described herein. In some embodiments, the cancer is lung adenocarcinoma, and the ALK fusion nucleic acid molecule is any of the ALK-MYO5C fusion nucleic acid molecules described herein or the ALK fusion polypeptide is any of the ALK-MYO5C fusion polypeptides described herein. In some embodiments, the cancer is unknown primary myoepithelial carcinoma, and the ALK fusion nucleic acid molecule is any of the ALK-AGAP1 fusion nucleic acid molecules described herein or the ALK fusion polypeptide is any of the ALK-AGAP1 fusion polypeptides described herein. In some embodiments, the cancer is pediatric soft tissue sarcoma undifferentiated, and the ALK fusion nucleic acid molecule is any of the ALK-MED13L fusion nucleic acid molecules described herein or the ALK fusion polypeptide is any of the ALK-MED13L fusion polypeptides described herein. In some embodiments, the cancer is ovary serous carcinoma, and the ALK fusion nucleic acid molecule is any of the ALK-MTBP fusion nucleic acid molecules described herein or the ALK fusion polypeptide is any of the ALK-MTBP fusion polypeptides described herein. In some embodiments, the cancer is lung non-small cell lung carcinoma (NOS), and the ALK fusion nucleic acid molecule is any of the ALK-SLC30A6 fusion nucleic acid molecules described herein or the ALK fusion polypeptide is any of the ALK-SLC30A6 fusion polypeptides described herein. In some embodiments, the cancer is prostate acinar adenocarcinoma, and the ALK fusion nucleic acid molecule is any of the ALK-GMCL1 fusion nucleic acid molecules described herein or the ALK fusion polypeptide is any of the ALK-GMCL1 fusion polypeptides described herein. In some embodiments, the cancer is lung adenocarcinoma, and the ALK fusion nucleic acid molecule is any of the ALK-AGAP1 fusion nucleic acid molecules described herein or the ALK fusion polypeptide is any of the ALK-AGAP1 fusion polypeptides described herein. In some embodiments, the cancer is lung non-small cell lung carcinoma (NOS), and the ALK fusion nucleic acid molecule is any of the ALK-ZNF454 fusion nucleic acid molecules described herein or the ALK fusion polypeptide is any of the ALK-ZNF454 fusion polypeptides described herein. In some embodiments, the cancer is uterus carcinosarcoma, and the ALK fusion nucleic acid molecule is any of the ALK-TTC28 fusion nucleic acid molecules described herein or the ALK fusion polypeptide is any of the ALK-TTC28 fusion polypeptides described herein. In some embodiments, the cancer is breast invasive ductal carcinoma (IDC), and the ALK fusion nucleic acid molecule is any of the ALK-NINJ2 fusion nucleic acid molecules described herein or the ALK fusion polypeptide is any of the ALK-NINJ2 fusion polypeptides described herein. In some embodiments, the cancer is pancreas ductal adenocarcinoma, and the ALK fusion nucleic acid molecule is any of the ALK-UTRN fusion nucleic acid molecules described herein or the ALK fusion polypeptide is any of the ALK-UTRN fusion polypeptides described herein. In some embodiments, the cancer is lung adenocarcinoma, and the ALK fusion nucleic acid molecule is any of the ALK-ACTN4 fusion nucleic acid molecules described herein or the ALK fusion polypeptide is any of the ALK-ACTN4 fusion polypeptides described herein. In some embodiments, the cancer is breast carcinoma (NOS), and the ALK fusion nucleic acid molecule is any of the ALK-CPSF7 fusion nucleic acid molecules described herein or the ALK fusion polypeptide is any of the ALK-CPSF7 fusion polypeptides described herein. In some embodiments, the cancer is lung adenocarcinoma, and the ALK fusion nucleic acid molecule is any of the ALK-SLC25A13 fusion nucleic acid molecules described herein or the ALK fusion polypeptide is any of the ALK-SLC25A13 fusion polypeptides described herein. In some embodiments, the cancer is lung adenocarcinoma, and the ALK fusion nucleic acid molecule is any of the ALK-CTNND1 fusion nucleic acid molecules described herein or the ALK fusion polypeptide is any of the ALK-CTNND1 fusion polypeptides described herein. In some embodiments, the cancer is lung adenocarcinoma, and the ALK fusion nucleic acid molecule is any of the ALK-KLC4 fusion nucleic acid molecules described herein or the ALK fusion polypeptide is any of the ALK-KLC4 fusion polypeptides described herein. In some embodiments, the cancer is lung non-small cell lung carcinoma (NOS), and the ALK fusion nucleic acid molecule is any of the ALK-BTBD9 fusion nucleic acid molecules described herein or the ALK fusion polypeptide is any of the ALK-BTBD9 fusion polypeptides described herein. In some embodiments, the cancer is lung non-small cell lung carcinoma (NOS), and the ALK fusion nucleic acid molecule is any of the ALK-CPQ fusion nucleic acid molecules described herein or the ALK fusion polypeptide is any of the ALK-CPQ fusion polypeptides described herein. In some embodiments, the cancer is unknown primary carcinoma (NOS), and the ALK fusion nucleic acid molecule is any of the ALK-KIF5C fusion nucleic acid molecules described herein or the ALK fusion polypeptide is any of the ALK-KIF5C fusion polypeptides described herein. In some embodiments, the cancer is anus squamous cell carcinoma, and the ALK fusion nucleic acid molecule is any of the ALK-MAGOHB fusion nucleic acid molecules described herein or the ALK fusion polypeptide is any of the ALK-MAGOHB fusion polypeptides described herein. In some embodiments, the cancer is uterus leiomyosarcoma, and the ALK fusion nucleic acid molecule is any of the ALK-COL3A1 fusion nucleic acid molecules described herein or the ALK fusion polypeptide is any of the ALK-COL3A1 fusion polypeptides described herein. In some embodiments, the cancer is lung adenocarcinoma, and the ALK fusion nucleic acid molecule is any of the ALK-OPRM1 fusion nucleic acid molecules described herein or the ALK fusion polypeptide is any of the ALK-OPRM1 fusion polypeptides described herein. In some embodiments, the cancer is skin melanoma, and the ALK fusion nucleic acid molecule is any of the ALK-GPN1 fusion nucleic acid molecules described herein or the ALK fusion polypeptide is any of the ALK-GPN1 fusion polypeptides described herein. In some embodiments, the cancer is esophagus adenocarcinoma, and the ALK fusion nucleic acid molecule is any of the ALK-SEC16B fusion nucleic acid molecules described herein or the ALK fusion polypeptide is any of the ALK-SEC16B fusion polypeptides described herein. In some embodiments, the cancer is skin melanoma, and the ALK fusion nucleic acid molecule is any of the ALK-UBE2L3 fusion nucleic acid molecules described herein or the ALK fusion polypeptide is any of the ALK-UBE2L3 fusion polypeptides described herein. In some embodiments, the cancer is lung adenocarcinoma, and the ALK fusion nucleic acid molecule is any of the ALK-METTL25 fusion nucleic acid molecules described herein or the ALK fusion polypeptide is any of the ALK-METTL25 fusion polypeptides described herein. In some embodiments, the cancer is lung adenocarcinoma, and the ALK fusion nucleic acid molecule is any of the ALK-CYS1 fusion nucleic acid molecules described herein or the ALK fusion polypeptide is any of the ALK-CYS1 fusion polypeptides described herein. In some embodiments, the cancer is lung non-small cell lung carcinoma (NOS), and the ALK fusion nucleic acid molecule is any of the ALK-ABCB11 fusion nucleic acid molecules described herein or the ALK fusion polypeptide is any of the ALK-ABCB11 fusion polypeptides described herein. In some embodiments, the cancer is lung adenocarcinoma, and the ALK fusion nucleic acid molecule is any of the ALK-INTS9 fusion nucleic acid molecules described herein or the ALK fusion polypeptide is any of the ALK-INTS9 fusion polypeptides described herein. In some embodiments, the cancer is lung adenocarcinoma, and the ALK fusion nucleic acid molecule is any of the ALK-CIB4 fusion nucleic acid molecules described herein or the ALK fusion polypeptide is any of the ALK-CIB4 fusion polypeptides described herein. In some embodiments, the cancer is soft tissue leiomyosarcoma, and the ALK fusion nucleic acid molecule is any of the ALK-WDR92 fusion nucleic acid molecules described herein or the ALK fusion polypeptide is any of the ALK-WDR92 fusion polypeptides described herein. In some embodiments, the cancer is lung adenocarcinoma, and the ALK fusion nucleic acid molecule is any of the ALK-OTX1 fusion nucleic acid molecules described herein or the ALK fusion polypeptide is any of the ALK-OTX1 fusion polypeptides described herein. In some embodiments, the cancer is breast carcinoma (NOS), and the ALK fusion nucleic acid molecule is any of the ALK-PDCD10 fusion nucleic acid molecules described herein or the ALK fusion polypeptide is any of the ALK-PDCD10 fusion polypeptides described herein. In some embodiments, the cancer is prostate acinar adenocarcinoma, and the ALK fusion nucleic acid molecule is any of the ALK-PTGER4 fusion nucleic acid molecules described herein or the ALK fusion polypeptide is any of the ALK-PTGER4 fusion polypeptides described herein. In some embodiments, the cancer is lung non-small cell lung carcinoma (NSCLC) (NOS), and the ALK fusion nucleic acid molecule is any of the ALK-PTPRJ fusion nucleic acid molecules described herein or the ALK fusion polypeptide is any of the ALK-PTPRJ fusion polypeptides described herein. In some embodiments, the cancer is lung adenocarcinoma, and the ALK fusion nucleic acid molecule is any of the ALK-ZSWIM2 fusion nucleic acid molecules described herein or the ALK fusion polypeptide is any of the ALK-ZSWIM2 fusion polypeptides described herein. In some embodiments, the cancer is lung non-small cell lung carcinoma (NSCLC) (NOS), and the ALK fusion nucleic acid molecule is any of the ALK-FHOD3 fusion nucleic acid molecules described herein or the ALK fusion polypeptide is any of the ALK-FHOD3 fusion polypeptides described herein. In some embodiments, the cancer is pancreas ductal adenocarcinoma, and the ALK fusion nucleic acid molecule is any of the ALK-FILIP1L fusion nucleic acid molecules described herein or the ALK fusion polypeptide is any of the ALK-FILIP1L fusion polypeptides described herein. In some embodiments, the cancer is pancreas cancer (NOS), and the ALK fusion nucleic acid molecule is any of the ALK-ITGA6 fusion nucleic acid molecules described herein or the ALK fusion polypeptide is any of the ALK-ITGA6 fusion polypeptides described herein. In some embodiments, the cancer is lung adenocarcinoma, and the ALK fusion nucleic acid molecule is any of the ALK-KCTD18 fusion nucleic acid molecules described herein or the ALK fusion polypeptide is any of the ALK-KCTD18 fusion polypeptides described herein. In some embodiments, the cancer is ovary clear cell carcinoma, and the ALK fusion nucleic acid molecule is any of the ALK-MAMDC4 fusion nucleic acid molecules described herein or the ALK fusion polypeptide is any of the ALK-MAMDC4 fusion polypeptides described herein. In some embodiments, the cancer is breast cancer (NOS), and the ALK fusion nucleic acid molecule is any of the ALK-PELI1 fusion nucleic acid molecules described herein or the ALK fusion polypeptide is any of the ALK-PELI1 fusion polypeptides described herein. In some embodiments, the cancer is lung non-small cell lung carcinoma (NOS), and the ALK fusion nucleic acid molecule is any of the ALK-LINC00535 fusion nucleic acid molecules described herein or the ALK fusion polypeptide is any of the ALK-LINC00535 fusion polypeptides described herein. In some embodiments, the cancer is lung adenocarcinoma, and the ALK fusion nucleic acid molecule is any of the ALK-CTBP1 fusion nucleic acid molecules described herein or the ALK fusion polypeptide is any of the ALK-CTBP1 fusion polypeptides described herein. In some embodiments, the cancer is lung adenocarcinoma, and the ALK fusion nucleic acid molecule is any of the ALK-CARMIL1 fusion nucleic acid molecules described herein or the ALK fusion polypeptide is any of the ALK-CARMIL1 fusion polypeptides described herein. In some embodiments, the cancer is gallbladder adenocarcinoma, and the ALK fusion nucleic acid molecule is any of the ALK-ZNF513 fusion nucleic acid molecules described herein or the ALK fusion polypeptide is any of the ALK-ZNF513 fusion polypeptides described herein. In some embodiments, the cancer is unknown primary adenocarcinoma, and the ALK fusion nucleic acid molecule is any of the ALK-TMCO3 fusion nucleic acid molecules described herein or the ALK fusion polypeptide is any of the ALK-TMCO3 fusion polypeptides described herein. In some embodiments, the cancer is colon adenocarcinoma (CRC), and the ALK fusion nucleic acid molecule is any of the ALK-SRSF7 fusion nucleic acid molecules described herein or the ALK fusion polypeptide is any of the ALK-SRSF7 fusion polypeptides described herein. In some embodiments, the cancer is vulva squamous cell carcinoma (SCC), and the ALK fusion nucleic acid molecule is any of the ALK-CASP8 fusion nucleic acid molecules described herein or the ALK fusion polypeptide is any of the ALK-CASP8 fusion polypeptides described herein. In some embodiments, the cancer is ovary high grade serous carcinoma, and the ALK fusion nucleic acid molecule is any of the ALK-CYP51A1 fusion nucleic acid molecules described herein or the ALK fusion polypeptide is any of the ALK-CYP51A1 fusion polypeptides described herein. In some embodiments, the cancer is prostate acinar adenocarcinoma, and the ALK fusion nucleic acid molecule is any of the ALK-GPR113 fusion nucleic acid molecules described herein or the ALK fusion polypeptide is any of the ALK-GPR113 fusion polypeptides described herein. In some embodiments, the cancer is fallopian tube serous carcinoma, and the ALK fusion nucleic acid molecule is any of the ALK-HADHA fusion nucleic acid molecules described herein or the ALK fusion polypeptide is any of the ALK-HADHA fusion polypeptides described herein. In some embodiments, the cancer is lung adenocarcinoma, and the ALK fusion nucleic acid molecule is any of the ALK-LRRFIP2 fusion nucleic acid molecules described herein or the ALK fusion polypeptide is any of the ALK-LRRFIP2 fusion polypeptides described herein. In some embodiments, the cancer is pediatric soft tissue sarcoma (NOS), and the ALK fusion nucleic acid molecule is any of the ALK-MYH10 fusion nucleic acid molecules described herein or the ALK fusion polypeptide is any of the ALK-MYH10 fusion polypeptides described herein. In some embodiments, the cancer is pediatric bone osteosarcoma, and the ALK fusion nucleic acid molecule is any of the ALK-PDE3A fusion nucleic acid molecules described herein or the ALK fusion polypeptide is any of the ALK-PDE3A fusion polypeptides described herein. In some embodiments, the cancer is uterus endometrial adenocarcinoma endometrioid, and the ALK fusion nucleic acid molecule is any of the ALK-PLEC fusion nucleic acid molecules described herein or the ALK fusion polypeptide is any of the ALK-PLEC fusion polypeptides described herein. In some embodiments, the cancer is brain glioblastoma (GBM), and the ALK fusion nucleic acid molecule is any of the ALK-QKI fusion nucleic acid molecules described herein or the ALK fusion polypeptide is any of the ALK-QKI fusion polypeptides described herein. In some embodiments, the cancer is brain glioblastoma (GBM), and the ALK fusion nucleic acid molecule is any of the ALK-SASH1 fusion nucleic acid molecules described herein or the ALK fusion polypeptide is any of the ALK-SASH1 fusion polypeptides described herein. In some embodiments, the cancer is pancreas ductal adenocarcinoma, and the ALK fusion nucleic acid molecule is any of the ALK-SRSF7 fusion nucleic acid molecules described herein or the ALK fusion polypeptide is any of the ALK-SRSF7 fusion polypeptides described herein. In some embodiments, the cancer is ovary clear cell carcinoma, and the ALK fusion nucleic acid molecule is any of the ALK-VASP fusion nucleic acid molecules described herein or the ALK fusion polypeptide is any of the ALK-VASP fusion polypeptides described herein. In some embodiments, the cancer is ovary serous carcinoma, and the ALK fusion nucleic acid molecule is any of the ALK-ZNF446 fusion nucleic acid molecules described herein or the ALK fusion polypeptide is any of the ALK-ZNF446 fusion polypeptides described herein. In some embodiments, the cancer is pediatric skin melanoma, and the ALK fusion nucleic acid molecule is any of the ALK-SOX13 fusion nucleic acid molecules described herein or the ALK fusion polypeptide is any of the ALK-SOX13 fusion polypeptides described herein. In some embodiments, the cancer is brain glioblastoma (GBM), and the ALK fusion nucleic acid molecule is any of the ALK-YPEL5 fusion nucleic acid molecules described herein or the ALK fusion polypeptide is any of the ALK-YPEL5 fusion polypeptides described herein. In some embodiments, the cancer is small intestine adenocarcinoma, and the ALK fusion nucleic acid molecule is any of the ALK-CAPN14 fusion nucleic acid molecules described herein or the ALK fusion polypeptide is any of the ALK-CAPN14 fusion polypeptides described herein. In some embodiments, the cancer is breast carcinoma (NOS), and the ALK fusion nucleic acid molecule is any of the ALK-MAP3K9 fusion nucleic acid molecules described herein or the ALK fusion polypeptide is any of the ALK-MAP3K9 fusion polypeptides described herein. In some embodiments, the cancer is prostate acinar adenocarcinoma, and the ALK fusion nucleic acid molecule is any of the ALK-SNX17 fusion nucleic acid molecules described herein or the ALK fusion polypeptide is any of the ALK-SNX17 fusion polypeptides described herein. In some embodiments, the cancer is lung adenocarcinoma, and the ALK fusion nucleic acid molecule is any of the ALK-HS1BP3 fusion nucleic acid molecules described herein or the ALK fusion polypeptide is any of the ALK-HS1BP3 fusion polypeptides described herein. In some embodiments, the cancer is ovary serous carcinoma, and the ALK fusion nucleic acid molecule is any of the ALK-CREBBP fusion nucleic acid molecules described herein or the ALK fusion polypeptide is any of the ALK-CREBBP fusion polypeptides described herein. In some embodiments, the cancer is breast carcinoma (NOS), and the ALK fusion nucleic acid molecule is any of the ALK-PAQR4 fusion nucleic acid molecules described herein or the ALK fusion polypeptide is any of the ALK-PAQR4 fusion polypeptides described herein. In some embodiments, the cancer is uterus leiomyosarcoma, and the ALK fusion nucleic acid molecule is any of the ALK-APH1A fusion nucleic acid molecules described herein or the ALK fusion polypeptide is any of the ALK-APH1A fusion polypeptides described herein.

[0265] In some embodiments of any of the methods provided herein, the sample is a sample described below. In some embodiments, the sample is obtained from the individual or from the cancer. In some embodiments, the methods further comprise obtaining the sample, e.g., from the individual or from the cancer. In some embodiments, the sample comprises a tissue biopsy sample, a liquid biopsy sample, or a normal control. In some embodiments, the sample is from a tumor biopsy, tumor specimen, or circulating tumor cell. In some embodiments, the sample is a liquid biopsy sample and comprises blood, plasma, cerebrospinal fluid, sputum, stool, urine, or saliva. In some embodiments, the sample comprises cells and/or nucleic acids from the cancer. In some embodiments, the sample comprises mRNA, DNA, circulating tumor DNA (ctDNA), cell-free DNA, or cell-free RNA from the cancer. In some embodiments, the sample is a liquid biopsy sample and comprises circulating tumor cells (CTCs). In some embodiments, the sample is a liquid biopsy sample and comprises cell-free DNA (cfDNA), circulating tumor DNA (ctDNA), or any combination thereof. In some embodiments, the fusion nucleic acid molecule or polypeptide is detected in a tissue biopsy sample, in a liquid biopsy sample, or in both a tissue biopsy sample and a liquid biopsy sample, from the individual.

### B. Detection of ALK Fusion Nucleic Acid Molecules and Polypeptides

[0266] Certain aspects of the present disclosure relate to detection of an ALK fusion nucleic acid molecule of the disclosure (e.g., an ALK-ABCB11, ALK-ACTN4, ALK-AGAP1, ALK-APH1A, ALK-AZI2, ALK-BTBD9, ALK-C2orf73, ALK-CAPN14, ALK-CARMIL1, ALK-CASP8, ALK-CDC42BPA, ALK-CIB4, ALK-CNTNAP5, ALK-COL3A1, ALK-CPQ, ALK-CPSF7, ALK-CREBBP, ALK-CTBP1, ALK-CTNND1, ALK-CYP51A1, ALK-CYS1, ALK-EPHA2, ALK-FHOD3, ALK-FILIP1L, ALK-GMCL1, ALK-GPN1, ALK-GPR113, ALK-HADHA, ALK-HS1BP3, ALK-INTS9, ALK-ITGA6, ALK-KCTD18, ALK-KIF5C, ALK-KLC4, ALK-LINC00535, ALK-LRRFIP2, ALK-MAGOHB, ALK-MAMDC4, ALK-MANBA, ALK-MAP3K9, ALK-MED13L, ALK-METTL25, ALK-MTBP, ALK-MYH10, ALK-MYO5C, ALK-NFIA, ALK-NINJ2, ALK-OPRM1, ALK-OTX1, ALK-PAQR4, ALK-PDCD10, ALK-PDE3A, ALK-PELI1, ALK-PLEC, ALK-PTGER4, ALK-PTPRJ, ALK-QKI, ALK-RPS6KA5, ALK-SASH1, ALK-SEC16B, ALK-SKAP1, ALK-SLC25A13, ALK-SLC30A6, ALK-SNX17, ALK-SOX13, ALK-SRSF7, ALK-TANGO6, ALK-TG, ALK-TMCO3, ALK-TNS3, ALK-TRIM24, ALK-TTC28, ALK-UBE2L3, ALK-UBE3B, ALK-UTRN, ALK-VASP, ALK-WDR92, ALK-YPEL5, ALK-ZNF446, ALK-ZNF454, ALK-ZNF513, or ALK-ZSWIM2 fusion nucleic acid molecule described herein) e.g., in a patient sample. In some embodiments, the fusion nucleic acid molecule is detected in vitro.

[0267] Other aspects of the present disclosure relate to detection of an ALK fusion polypeptide of the disclosure (e.g., an ALK-ABCB11, ALK-ACTN4, ALK-AGAP1, ALK-APH1A, ALK-AZI2, ALK-BTBD9, ALK-C2orf73, ALK-CAPN14, ALK-CARMIL1, ALK-CASP8, ALK-CDC42BPA, ALK-CIB4, ALK-CNTNAP5, ALK-COL3A1, ALK-CPQ, ALK-CPSF7, ALK-CREBBP, ALK-CTBP1, ALK-CTNND1, ALK-CYP51A1, ALK-CYS1, ALK-EPHA2, ALK-FHOD3, ALK-FILIP1L, ALK-GMCL1, ALK-GPN1, ALK-GPR113, ALK-HADHA, ALK-HS1BP3, ALK-INTS9, ALK-ITGA6, ALK-KCTD18, ALK-KIF5C, ALK-KLC4, ALK-LINC00535, ALK-LRRFIP2, ALK-MAGOHB, ALK-MAMDC4, ALK-MANBA, ALK-MAP3K9, ALK-MED13L, ALK-METTL25, ALK-MTBP, ALK-MYH10, ALK-MYO5C, ALK-NFIA, ALK-NINJ2, ALK-OPRM1, ALK-OTX1, ALK-PAQR4, ALK-PDCD10, ALK-PDE3A, ALK-PELI1, ALK-PLEC, ALK-PTGER4, ALK-PTPRJ, ALK-QKI, ALK-RPS6KA5, ALK-SASH1, ALK-SEC16B, ALK-SKAP1, ALK-SLC25A13, ALK-SLC30A6, ALK-SNX17, ALK-SOX13, ALK-SRSF7, ALK-TANGO6, ALK-TG, ALK-TMCO3, ALK-TNS3, ALK-TRIM24, ALK-TTC28, ALK-UBE2L3, ALK-UBE3B, ALK-UTRN, ALK-VASP, ALK-WDR92, ALK-YPEL5, ALK-ZNF446, ALK-ZNF454, ALK-ZNF513, or ALK-ZSWIM2 fusion nucleic acid molecule described herein) e.g., in a patient sample. In some embodiments, the fusion polypeptide is detected in vitro.

### (i) Detection of ALK Fusion Nucleic Acid Molecules

[0268] Methods for detecting an ALK fusion nucleic acid molecule of the disclosure (e.g., an ALK-ABCB11, ALK-ACTN4, ALK-AGAP1, ALK-APH1A, ALK-AZI2, ALK-BTBD9, ALK-C2orf73, ALK-CAPN14, ALK-CARMIL1, ALK-CASP8, ALK-CDC42BPA, ALK-CIB4, ALK-CNTNAP5, ALK-COL3A1, ALK-CPQ, ALK-CPSF7, ALK-CREBBP, ALK-CTBP1, ALK-CTNND1, ALK-CYP51A1, ALK-CYS1, ALK-EPHA2, ALK-FHOD3, ALK-FILIP1L, ALK-GMCL1, ALK-GPN1, ALK-GPR113, ALK-HADHA, ALK-HS1BP3, ALK-INTS9, ALK-ITGA6, ALK-KCTD18, ALK-KIF5C, ALK-KLC4, ALK-LINC00535, ALK-LRRFIP2, ALK-MAGOHB, ALK-MAMDC4, ALK-MANBA, ALK-MAP3K9, ALK-MED13L, ALK-METTL25, ALK-MTBP, ALK-MYH10, ALK-MYO5C, ALK-NFIA, ALK-NINJ2, ALK-OPRM1, ALK-OTX1, ALK-PAQR4, ALK-PDCD10, ALK-PDE3A, ALK-PELI1, ALK-PLEC, ALK-PTGER4, ALK-PTPRJ, ALK-QKI, ALK-RPS6KA5, ALK-SASH1, ALK-SEC16B, ALK-SKAP1, ALK-SLC25A13, ALK-SLC30A6, ALK-SNX17, ALK-SOX13, ALK-SRSF7, ALK-TANGO6, ALK-TG, ALK-TMCO3, ALK-TNS3, ALK-TRIM24, ALK-TTC28, ALK-UBE2L3, ALK-UBE3B, ALK-UTRN, ALK-VASP, ALK-WDR92, ALK-YPEL5, ALK-ZNF446, ALK-ZNF454, ALK-ZNF513, or ALK-ZSWIM2 fusion nucleic acid molecule described herein), are known in the art. For example, in some embodiments, an ALK fusion nucleic acid molecule is detected by sequencing part or all of a gene involved in the fusion nucleic acid molecule, e.g., an ALK gene, and/or a corresponding fusion partner gene described herein (e.g., as described herein, for example in any of Tables 1-7, and/or in the Examples herein), by next-generation or other sequencing of DNA, RNA, or cDNA. In some embodiments, an ALK fusion nucleic acid molecule of the disclosure is detected by PCR amplification of DNA, RNA, or cDNA. In some embodiments, an ALK fusion nucleic acid molecule of the disclosure is detected by in situ hybridization using one or more polynucleotides that hybridize to a locus involved in the fusion nucleic acid molecule, e.g., an ALK locus, and/or a corresponding fusion partner gene locus described herein (e.g., in Tables 1-7, and/or in the Examples herein), e.g., using fluorescence in situ hybridization (FISH). In some embodiments, an ALK fusion nucleic acid molecule of the disclosure is detected in a cancer or tumor cell, e.g., using tumor tissue, such as from a tumor biopsy or other tumor specimen; in a circulating cancer or tumor cell, e.g., using a liquid biopsy, such as from blood, plasma, cerebrospinal fluid, sputum, stool, urine, or saliva; or in circulating tumor DNA (ctDNA), e.g., using a liquid biopsy, such as from blood, plasma, cerebrospinal fluid, sputum, stool, urine, or saliva.

[0269] Exemplary and non-limiting methods for detecting an ALK fusion nucleic acid molecule of the disclosure are provided below.

[0270] In some embodiments, an ALK fusion nucleic acid molecule of the disclosure is detected using any suitable method known in the art, such as a nucleic acid hybridization assay, an amplification-based assay (e.g., polymerase chain reaction, PCR), a PCR-RFLP assay, real-time PCR, sequencing (e.g., Sanger sequencing or next-generation sequencing), a screening analysis (e.g., using karyotype methods), fluorescence in situ hybridization (FISH), break away FISH, spectral karyotyping, multiplex-FISH, comparative genomic hybridization, in situ hybridization, single specific primer-polymerase chain reaction (SSP-PCR), high performance liquid chromatography (HPLC), or mass-spectrometric genotyping. Methods of analyzing samples, e.g., to detect a nucleic acid molecule, are described in U.S. Pat. No. 9,340,830 and in WO2012092426A1, which are hereby incorporated by reference in their entirety. In some embodiments, an ALK fusion nucleic acid molecule of the disclosure is detected by sequencing. In some embodiments, the sequencing comprises a massively parallel sequencing (MPS) technique, whole genome sequencing (WGS), whole exome sequencing, targeted sequencing, direct sequencing, or a Sanger sequencing technique. In some embodiments, the massively parallel sequencing (MPS) technique comprises next-generation sequencing (NGS).

[0271] In some embodiments, an ALK fusion nucleic acid molecule of the disclosure is detected using an in situ hybridization method, such as a fluorescence in situ hybridization (FISH) method.

[0272] In some embodiments, FISH analysis is used to identify the chromosomal rearrangement resulting in an ALK fusion nucleic acid molecule as described herein. In some embodiments, FISH analysis is used to identify an RNA molecule comprising or encoding an ALK fusion nucleic acid molecule of the disclosure. Methods for performing FISH are known in the art and can be used in nearly any type of tissue. In FISH analysis, nucleic acid probes which are detectably labeled, e.g. fluorescently labeled, are allowed to bind to specific regions of DNA, e.g., a chromosome, or an RNA, e.g., an mRNA, and then examined, e.g., through a microscope. See, for example, U.S. Pat. No. 5,776,688. DNA or RNA molecules are first fixed onto a slide, the labeled probe is then hybridized to the DNA or RNA molecules, and then visualization is achieved, e.g., using enzyme-linked label-based detection methods known in the art. Generally, the resolution of FISH analysis is on the order of detection of 60 to 100000 nucleotides, e.g., 60 base pairs (bp) up to 100 kilobase pairs of DNA. Nucleic acid probes used in FISH analysis comprise single stranded nucleic acids. Such probes are typically at least about 50 nucleotides in length. In some embodiments, probes comprise about 100 to about 500 nucleotides. Probes that hybridize with centromeric DNA and locus-specific DNA or RNA are available commercially, for example, from Vysis, Inc. (Downers Grove, Ill.), Molecular Probes, Inc. (Eugene, Oreg.) or from Cytocell (Oxfordshire, UK). Alternatively, probes can be made non-commercially from chromosomal or genomic DNA or other sources of nucleic acids through standard techniques. Examples of probes, labeling and hybridization methods are known in the art.

[0273] Several variations of FISH methods are known in the art and are suitable for use according to the methods of the disclosure, including single-molecule RNA FISH, Fiber FISH, Q-FISH, Flow-FISH, MA-FISH, break-away FISH, hybrid fusion-FISH, and multi-fluor FISH or mFISH. In some embodiments, “break-away FISH” is used in the methods provided herein. In break-away FISH, at least one probe targeting a fusion junction or breakpoint and at least one probe targeting an individual gene of the fusion, e.g., at one or more exons and or introns of the gene, are utilized. In normal cells (i.e., cells not having a fusion nucleic acid molecule described herein), both probes are observed (or a secondary color is observed due to the close proximity of the two genes of the gene fusion); and in cells having a fusion nucleic acid molecule described herein, only a single gene probe is observed due to the presence of a rearrangement resulting in the fusion nucleic acid molecule.

[0274] In some embodiments, an ALK fusion nucleic acid molecule of the disclosure is detected using an array-based method, such as array-based comparative genomic hybridization (CGH) methods. In array-based CGH methods, a first sample of nucleic acids (e.g., from a sample, such as from a tumor, or a tissue or liquid biopsy) is labeled with a first label, while a second sample of nucleic acids (e.g., a control, such as from a healthy cell/tissue) is labeled with a second label. In some embodiments, equal quantities of the two samples are mixed and co-hybridized to a DNA microarray of several thousand evenly spaced cloned DNA fragments or oligonucleotides, which have been spotted in triplicate on the array. After hybridization, digital imaging systems are used to capture and quantify the relative fluorescence intensities of each of the hybridized fluorophores. The resulting ratio of the fluorescence intensities is proportional to the ratio of the copy numbers of DNA sequences in the two samples. In some embodiments, where there are chromosomal deletions or multiplications, differences in the ratio of the signals from the two labels are detected and the ratio provides a measure of the copy number. Array-based CGH can also be performed with single-color labeling. In single color CGH, a control (e.g., control nucleic acid sample, such as from a healthy cell/tissue) is labeled and hybridized to one array and absolute signals are read, and a test sample (e.g., a nucleic acid sample obtained from an individual or from a tumor, or a tissue or liquid biopsy) is labeled and hybridized to a second array (with identical content) and absolute signals are read. Copy number differences are calculated based on absolute signals from the two arrays.

[0275] In some embodiments, an ALK fusion nucleic acid molecule of the disclosure is detected using an amplification-based method. As is known in the art, in such amplification-based methods, a sample of nucleic acids, such as a sample obtained from an individual, a tumor or a tissue or liquid biopsy, is used as a template in an amplification reaction (e.g., Polymerase Chain Reaction (PCR)) using one or more oligonucleotides or primers, e.g., such as one or more oligonucleotides or primers provided herein. The presence of an ALK fusion nucleic acid molecule of the disclosure in the sample can be determined based on the presence or absence of an amplification product. Quantitative amplification methods are also known in the art and may be used according to the methods provided herein. Methods of measurement of DNA copy number at microsatellite loci using quantitative PCR analysis are known in the art. The known nucleotide sequence for genes is sufficient to enable one of skill in the art to routinely select primers to amplify any portion of the gene. Fluorogenic quantitative PCR can also be used. In fluorogenic quantitative PCR, quantitation is based on the amount of fluorescence signals, e.g., TaqMan and Sybr green.

[0276] Other amplification methods suitable for use according to the methods provided herein include, e.g., ligase chain reaction (LCR), transcription amplification, self-sustained sequence replication, dot PCR, and linker adapter PCR.

[0277] In some embodiments, an ALK fusion nucleic acid molecule of the disclosure is detected using a sequencing method. Any method of sequencing known in the art can be used to detect an ALK fusion nucleic acid molecule provided herein. Exemplary sequencing methods that may be used to detect an ALK fusion nucleic acid molecule provided herein include those based on techniques developed by Maxam and Gilbert or Sanger. Automated sequencing procedures may also be used, e.g., including sequencing by mass spectrometry.

[0278] In some embodiments, an ALK fusion nucleic acid molecule of the disclosure is detected using hybrid capture-based sequencing (hybrid capture-based NGS), e.g., using adaptor ligation-based libraries. See, e.g., Frampton, G. M. et al. (2013) Nat. Biotech. 31:1023-1031, which is hereby incorporated by reference. In some embodiments, an ALK fusion nucleic acid molecule of the disclosure is detected using next-generation sequencing (NGS). Next-generation sequencing includes any sequencing method that determines the nucleotide sequence of either individual nucleic acid molecules or clonally expanded proxies for individual nucleic acid molecules in a highly parallel fashion (e.g., greater than 10 molecules may be sequenced simultaneously). Next generation sequencing methods suitable for use according to the methods provided herein are known in the art and include, without limitation, massively parallel short-read sequencing, template-based sequencing, pyrosequencing, real-time sequencing comprising imaging the continuous incorporation of dye-labeling nucleotides during DNA synthesis, nanopore sequencing, sequencing by hybridization, nano-transistor array based sequencing, polony sequencing, scanning tunneling microscopy (STM)-based sequencing, or nanowire-molecule sensor based sequencing. See, e.g., Metzker, M. (2010) Nature Biotechnology Reviews 11:31-46, which is hereby incorporated by reference. Exemplary NGS methods and platforms that may be used to detect an ALK fusion nucleic acid molecule provided herein include, without limitation, the HeliScope Gene Sequencing system from Helicos BioSciences (Cambridge, MA., USA), the PacBio RS system from Pacific Biosciences (Menlo Park, CA, USA), massively parallel short-read sequencing such as the Solexa sequencer and other methods and platforms from Illumina Inc. (San Diego, CA, USA), 454 sequencing from 454 LifeSciences (Branford, CT, USA), Ion Torrent sequencing from ThermoFisher (Waltham, MA, USA), or the SOLiD sequencer from Applied Biosystems (Foster City, CA, USA). Additional exemplary methods and platforms that may be used to detect an ALK fusion nucleic acid molecule provided herein include, without limitation, the Genome Sequencer (GS) FLX System from Roche (Basel, CHE), the G.007 polonator system, the Solexa Genome Analyzer, HiSeq 2500, HiSeq3000, HiSeq 4000, and NovaSeq 6000 platforms from Illumina Inc. (San Diego, CA, USA).

[0279] In some embodiments of any of the methods provided herein, the methods may comprise one or more of the steps of: (i) obtaining a sample from an individual (e.g., an individual having, suspected of having, or determined to have cancer), (ii) extracting nucleic acid molecules (e.g., a mixture of tumor or cancer nucleic acid molecules and non-tumor or non-cancer nucleic acid molecules) from the sample, (iii) ligating one or more adapters to the nucleic acid molecules extracted from the sample (e.g., one or more amplification primers, flow cell adapter sequences, substrate adapter sequences, sample index sequences, or unique molecular identifier (UMI) sequences), (iv) amplifying the nucleic acid molecules (e.g., using a polymerase chain reaction (PCR) amplification technique, a non-PCR amplification technique, or an isothermal amplification technique), (v) capturing nucleic acid molecules from the amplified nucleic acid molecules (e.g., by hybridization to one or more bait molecules, where the bait molecules each comprise one or more nucleic acid molecules (e.g., capture nucleic acid molecules) that each comprise a region that is complementary to a region of a captured nucleic acid molecule), (vi) sequencing the nucleic acid molecules extracted from the sample (or library proxies derived therefrom) using, e.g., a next-generation (massively parallel) sequencing technique, a whole genome sequencing (WGS) technique, a whole exome sequencing technique, a targeted sequencing technique, a direct sequencing technique, or a Sanger sequencing technique) using, e.g., a next-generation (massively parallel) sequencer, and (vii) generating, displaying, transmitting, and/or delivering a report (e.g., an electronic, web-based, or paper report) to the individual (or patient), a caregiver, a healthcare provider, a physician, an oncologist, an electronic medical record system, a hospital, a clinic, a third-party payer, an insurance company, or a government office. In some instances, the report comprises output from the methods described herein. In some instances, all or a portion of the report may be displayed in a graphical user interface of an online or web-based healthcare portal. In some instances, the report is transmitted via a computer network or peer-to-peer connection.

[0280] In some embodiments of any of the methods provided herein, the methods may comprise one or more of the steps of: (a) providing a plurality of nucleic acid molecules obtained from a sample from an individual (e.g., an individual having, suspected of having or determined to have cancer), wherein the plurality of nucleic acid molecules comprises nucleic acid molecules corresponding to an ALK fusion nucleic acid molecule of the disclosure; (b) ligating one or more adapters onto one or more nucleic acid molecules from the plurality of nucleic acid molecules; (c) amplifying the one or more ligated nucleic acid molecules from the plurality of nucleic acid molecules; (d) capturing amplified nucleic acid molecules from the amplified nucleic acid molecules; (e) sequencing, by a sequencer, the captured nucleic acid molecules to obtain a plurality of sequence reads that represent the captured nucleic acid molecules, wherein one or more of the plurality of sequence reads correspond to the ALK fusion nucleic acid molecule; (f) analyzing the plurality of sequence reads; and (g) based on the analysis, detecting the presence or absence of the ALK fusion nucleic acid molecule in the sample. In some embodiments, the methods further comprise receiving, at one or more processors, sequence read data for the plurality of sequence reads. In some embodiments, the analyzing the plurality of sequence reads comprises identifying, using the one or more processors, the presence or absence of sequence reads corresponding to the fusion nucleic acid molecule. In some embodiments, the amplified nucleic acid molecules are captured by hybridization with one or more bait molecules.

[0281] In some embodiments of any of the methods provided herein, the methods may comprise one or more of the steps of: (a) providing a sample from an individual (e.g., an individual having, suspected of having or determined to have cancer), wherein the sample comprises a plurality of nucleic acid molecules; (b) preparing a nucleic acid sequencing library from the plurality of nucleic acid molecules in the sample; (c) amplifying said library; (d) selectively enriching for one or more nucleic acid molecules comprising nucleotide sequences corresponding to an ALK fusion nucleic acid molecule of the disclosure in said library to produce an enriched sample; (e) sequencing the enriched sample, thereby producing a plurality of sequence reads; (f) analyzing the plurality of sequence reads for the presence of the ALK fusion nucleic acid molecule; (g) detecting, based on the analyzing step, the presence or absence of the ALK fusion nucleic acid molecule in the sample from the individual.

[0282] In some embodiments of any of the methods provided herein, the plurality of nucleic acid molecules comprises a mixture of cancer nucleic acid molecules and non-cancer nucleic acid molecules. In some embodiments, the cancer nucleic acid molecules are derived from a tumor portion of a heterogeneous tissue biopsy sample, and the non-cancer nucleic acid molecules are derived from a normal portion of the heterogeneous tissue biopsy sample. In some embodiments, the sample comprises a liquid biopsy sample, and the cancer nucleic acid molecules are derived from a circulating tumor DNA (ctDNA) fraction of the liquid biopsy sample; and the non-cancer nucleic acid molecules are derived from a non-tumor fraction of the liquid biopsy sample or a cell-free DNA (cfDNA) fraction of the liquid biopsy sample.

[0283] In some embodiments of any of the methods, the one or more adapters comprise amplification primers, flow cell adaptor sequences, substrate adapter sequences, sample index sequences, or unique molecular identifier (UMI) sequences. In some embodiments, the one or more adapters comprise one or more sample index sequences. As is known in the art, sample indexes allow the sequencing of multiple samples on the same instrument flow cell or chip (i.e., multiplexing). Sample indexes are typically between about 8 and about 10 bases in length, and comprise a nucleotide sequence specific to a sample that is used to assign sequence reads to the correct sample during data analysis. In some embodiments, the one or more adapters comprise one or more unique molecule identifiers (UMIs). As is known in the art, UMIs comprise short nucleotide sequences that include a unique barcode that is incorporated into each molecule in a given sample library. UMIs are useful for identifying PCR duplicates created during library amplification steps, and/or for reducing the rate of false-positive variant calls and increasing variant detection, since variant alleles present in the original sample (true variants) can be distinguished from errors introduced during library preparation, target enrichment, or sequencing.

[0284] In some embodiments, the selectively enriching comprises: (a) combining one or more bait molecules with the library, thereby hybridizing the one or more bait molecules to one or more nucleic acid molecules comprising nucleotide sequences corresponding to the ALK fusion nucleic acid molecule and producing nucleic acid hybrids; and (b) isolating the nucleic acid hybrids to produce the enriched sample. In some embodiments, the captured nucleic acid molecules are captured from the amplified nucleic acid molecules by hybridization to one or more bait molecules. In some embodiments, the amplifying comprises performing a polymerase chain reaction (PCR) amplification technique, a non-PCR amplification technique, or an isothermal amplification technique. In some embodiments, the sequencing comprises use of a massively parallel sequencing (MPS) technique, whole genome sequencing (WGS), whole exome sequencing, targeted sequencing, direct sequencing, or a Sanger sequencing technique. In some embodiments, the sequencing comprises a massively parallel sequencing technique, and the massively parallel sequencing technique comprises next generation sequencing (NGS). In some embodiments, the sequencer comprises a next generation sequencer.

[0285] In some embodiments of any of the methods provided herein, the methods further comprise selectively enriching for one or more nucleic acids in the sample comprising nucleotide sequences corresponding to the ALK fusion nucleic acid molecule of the disclosure. In some embodiments, the selectively enriching produces an enriched sample. In some embodiments, the selectively enriching comprises: (a) combining one or more bait molecules with the sample, thereby hybridizing the one or more bait molecules to one or more nucleic acids in the sample comprising nucleotide sequences corresponding to the ALK fusion nucleic acid molecule and producing nucleic acid hybrids; and (b) isolating the nucleic acid hybrids to produce the enriched sample. In some embodiments, the selectively enriching comprises amplifying the one or more nucleic acids comprising nucleotide sequences corresponding to the ALK fusion nucleic acid molecule using a polymerase chain reaction (PCR) to produce an enriched sample. In some embodiments, the methods further comprise sequencing the enriched sample.

[0286] In some embodiments of any of the methods provided herein, the methods further comprise generating a molecular profile for the individual or the sample, based, at least in part, on detecting the presence or absence of the ALK fusion nucleic acid molecule. In some embodiments, the molecular profile for the individual or sample further comprises results from a comprehensive genomic profiling (CGP) test, a gene expression profiling test, a cancer hotspot panel test, a DNA methylation test, a DNA fragmentation test, an RNA fragmentation test, or any combination thereof. In some embodiments, the molecular profile further comprises results from a nucleic acid sequencing-based test.

[0287] In some embodiments of any of the methods provided herein, the methods further comprise selecting a treatment, administering a treatment, or applying a treatment to the individual based on the generated molecular profile, wherein the treatment comprises an anti-cancer therapy, e.g., as described herein, e.g., an ALK-targeted therapy.

[0288] In some embodiments of any of the methods provided herein, the methods further comprise generating a report indicating the presence or absence of the ALK fusion nucleic acid molecule in the sample. In some embodiments, the methods further comprise generating, by the one or more processors, a report indicating the presence or absence of the ALK fusion nucleic acid molecule in the sample. In some embodiments, the methods further comprise transmitting the report to a healthcare provider. In some embodiments, the report is transmitted via a computer network or a peer-to-peer connection.

[0289] In some embodiments of any of the methods provided herein, the methods further comprise acquiring knowledge of or detecting in a sample from the individual a base substitution, a short insertion/deletion (indel), a copy number alteration, or a genomic rearrangement in one or more genes. In some embodiments, the one or more genes comprise one or more of ALK, ABCB11, ACTN4, AGAP1, APH1A, AZI2, BTBD9, C2orf73, CAPN14, CARMIL1, CASP8, CDC42BPA, CIB4, CNTNAP5, COL3A1, CPQ, CPSF7, CREBBP, CTBP1, CTNND1, CYP51A1, CYS1, EPHA2, FHOD3, FILIP1L, GMCL1, GPN1, GPR113, HADHA, HS1BP3, INTS9, ITGA6, KCTD18, KIF5C, KLC4, LINC00535, LRRFIP2, MAGOHB, MAMDC4, MANBA, MAP3K9, MED13L, METTL25, MTBP, MYH10, MYO5C, NFIA, NINJ2, OPRM1, OTX1, PAQR4, PDCD10, PDE3A, PELI1, PLEC, PTGER4, PTPRJ, QKI, RPS6KA5, SASH1, SEC16B, SKAP1, SLC25A13, SLC30A6, SNX17, SOX13, SRSF7, TANGO6, TG, TMCO3, TNS3, TRIM24, TTC28, UBE2L3, UBE3B, UTRN, VASP, WDR92, YPEL5, ZNF446, ZNF454, ZNF513, or ZSWIM2, or a gene listed in Table 1, or a panel of known/suspected oncogenes and/or tumor suppressors, or any combination thereof.

[0290] The disclosed methods may be used with any of a variety of samples, e.g., as described in further detail below. For example, in some instances, the sample may comprise a tissue biopsy sample, a liquid biopsy sample, or a normal control. In some instances, the sample may be a liquid biopsy sample and may comprise blood, plasma, cerebrospinal fluid, sputum, stool, urine, or saliva. In some instances, the sample may be a liquid biopsy sample and may comprise circulating tumor cells (CTCs). In some instances, the sample may be a liquid biopsy sample and may comprise cell-free DNA (cfDNA), circulating tumor DNA (ctDNA), or any combination thereof.

[0291] In some instances, the nucleic acid molecules extracted from a sample may comprise a mixture of tumor or cancer nucleic acid molecules and non-tumor or non-cancer nucleic acid molecules. In some instances, the tumor nucleic acid molecules may be derived from a tumor portion of a heterogeneous tissue biopsy sample, and the non-tumor nucleic acid molecules may be derived from a normal portion of the heterogeneous tissue biopsy sample. In some instances, the sample may comprise a liquid biopsy sample, and the tumor or cancer nucleic acid molecules may be derived from a circulating tumor DNA (ctDNA) fraction of the liquid biopsy sample while the non-tumor or non-cancer nucleic acid molecules may be derived from a non-tumor or non-cancer, cell-free DNA (cfDNA) fraction of the liquid biopsy sample. In some embodiments of any of the methods provided herein, the method further comprises determining the circulating tumor DNA (ctDNA) fraction of a liquid biopsy sample.

### (ii) Detection of Fusion Polypeptides

[0292] Also provided herein are methods of detecting an ALK fusion polypeptide of the disclosure (e.g., an ALK-ABCB11, ALK-ACTN4, ALK-AGAP1, ALK-APH1A, ALK-AZI2, ALK-BTBD9, ALK-C2orf73, ALK-CAPN14, ALK-CARMIL1, ALK-CASP8, ALK-CDC42BPA, ALK-CIB4, ALK-CNTNAP5, ALK-COL3A1, ALK-CPQ, ALK-CPSF7, ALK-CREBBP, ALK-CTBP1, ALK-CTNND1, ALK-CYP51A1, ALK-CYS1, ALK-EPHA2, ALK-FHOD3, ALK-FILIP1L, ALK-GMCL1, ALK-GPN1, ALK-GPR113, ALK-HADHA, ALK-HS1BP3, ALK-INTS9, ALK-ITGA6, ALK-KCTD18, ALK-KIF5C, ALK-KLC4, ALK-LINC00535, ALK-LRRFIP2, ALK-MAGOHB, ALK-MAMDC4, ALK-MANBA, ALK-MAP3K9, ALK-MED13L, ALK-METTL25, ALK-MTBP, ALK-MYH10, ALK-MYO5C, ALK-NFIA, ALK-NINJ2, ALK-OPRM1, ALK-OTX1, ALK-PAQR4, ALK-PDCD10, ALK-PDE3A, ALK-PELI1, ALK-PLEC, ALK-PTGER4, ALK-PTPRJ, ALK-QKI, ALK-RPS6KA5, ALK-SASH1, ALK-SEC16B, ALK-SKAP1, ALK-SLC25A13, ALK-SLC30A6, ALK-SNX17, ALK-SOX13, ALK-SRSF7, ALK-TANGO6, ALK-TG, ALK-TMCO3, ALK-TNS3, ALK-TRIM24, ALK-TTC28, ALK-UBE2L3, ALK-UBE3B, ALK-UTRN, ALK-VASP, ALK-WDR92, ALK-YPEL5, ALK-ZNF446, ALK-ZNF454, ALK-ZNF513, or ALK-ZSWIM2 fusion polypeptide described herein), or a fragment thereof.

[0293] An ALK fusion polypeptide provided herein, or a fragment thereof, may be detected or measured, e.g., in a sample obtained from an individual, using any method known in the art, such as using antibodies (e.g., an antibody described herein), mass spectrometry (e.g., tandem mass spectrometry), a reporter assay (e.g., a fluorescence-based assay), immunoblots such as a Western blot, immunoassays such as enzyme-linked immunosorbent assays (ELISA), immunohistochemistry, other immunological assays (e.g., fluid or gel precipitin reactions, immunodiffusion, immunoelectrophoresis, radioimmunoassay (RIA), immunofluorescent assays), and analytic biochemical methods (e.g., electrophoresis, capillary electrophoresis, high performance liquid chromatography (HPLC), thin layer chromatography (TLC), hyperdiffusion chromatography).

[0294] In some embodiments, an ALK fusion polypeptide provided herein, or a fragment thereof, can be distinguished from a reference polypeptide, e.g., a non-mutant or wild type protein or polypeptide, with an antibody or antibody fragment that reacts differentially with a mutant protein or polypeptide (e.g., an ALK fusion polypeptide provided herein or a fragment thereof) as compared to a reference protein or polypeptide. In some embodiments, an ALK fusion polypeptide of the disclosure, or a fragment thereof, can be distinguished from a reference polypeptide, e.g., a non-mutant or wild type protein or polypeptide, by reaction with a detection reagent, e.g., a substrate, e.g., a substrate for catalytic activity, e.g., phosphorylation.

[0295] In some aspects, methods of detection of an ALK fusion polypeptide of the disclosure, or a fragment thereof, are provided, comprising contacting a sample, e.g., a sample described herein, comprising an ALK fusion polypeptide described herein, with a detection reagent provided herein (e.g., an antibody of the disclosure), and determining if the ALK fusion polypeptide is present in the sample.

(iii) Detection Reagents

[0296] In some aspects, provided herein are reagents for detecting an ALK fusion nucleic acid molecule of the disclosure (e.g., an ALK-ABCB11, ALK-ACTN4, ALK-AGAP1, ALK-APH1A, ALK-AZI2, ALK-BTBD9, ALK-C2orf73, ALK-CAPN14, ALK-CARMIL1, ALK-CASP8, ALK-CDC42BPA, ALK-CIB4, ALK-CNTNAP5, ALK-COL3A1, ALK-CPQ, ALK-CPSF7, ALK-CREBBP, ALK-CTBP1, ALK-CTNND1, ALK-CYP51A1, ALK-CYS1, ALK-EPHA2, ALK-FHOD3, ALK-FILIP1L, ALK-GMCL1, ALK-GPN1, ALK-GPR113, ALK-HADHA, ALK-HS1BP3, ALK-INTS9, ALK-ITGA6, ALK-KCTD18, ALK-KIF5C, ALK-KLC4, ALK-LINC00535, ALK-LRRFIP2, ALK-MAGOHB, ALK-MAMDC4, ALK-MANBA, ALK-MAP3K9, ALK-MED13L, ALK-METTL25, ALK-MTBP, ALK-MYH10, ALK-MYO5C, ALK-NFIA, ALK-NINJ2, ALK-OPRM1, ALK-OTX1, ALK-PAQR4, ALK-PDCD10, ALK-PDE3A, ALK-PELI1, ALK-PLEC, ALK-PTGER4, ALK-PTPRJ, ALK-QKI, ALK-RPS6KA5, ALK-SASH1, ALK-SEC16B, ALK-SKAP1, ALK-SLC25A13, ALK-SLC30A6, ALK-SNX17, ALK-SOX13, ALK-SRSF7, ALK-TANGO6, ALK-TG, ALK-TMCO3, ALK-TNS3, ALK-TRIM24, ALK-TTC28, ALK-UBE2L3, ALK-UBE3B, ALK-UTRN, ALK-VASP, ALK-WDR92, ALK-YPEL5, ALK-ZNF446, ALK-ZNF454, ALK-ZNF513, or ALK-ZSWIM2 fusion nucleic acid molecule described herein), or a fragment thereof, e.g., according to the methods of detection provided herein. In some embodiments, a detection reagent provided herein comprises a nucleic acid molecule, e.g., a DNA, RNA, or mixed DNA/RNA molecule, comprising a nucleotide sequence that is complementary to a nucleotide sequence on a target nucleic acid molecule, e.g., a nucleic acid molecule that is or comprises an ALK fusion nucleic acid molecule described herein or a fragment or portion thereof.

[0297] In other aspects, provided herein are reagents for detecting an ALK fusion polypeptide of the disclosure (e.g., an ALK-ABCB11, ALK-ACTN4, ALK-AGAP1, ALK-APH1A, ALK-AZI2, ALK-BTBD9, ALK-C2orf73, ALK-CAPN14, ALK-CARMIL1, ALK-CASP8, ALK-CDC42BPA, ALK-CIB4, ALK-CNTNAP5, ALK-COL3A1, ALK-CPQ, ALK-CPSF7, ALK-CREBBP, ALK-CTBP1, ALK-CTNND1, ALK-CYP51A1, ALK-CYS1, ALK-EPHA2, ALK-FHOD3, ALK-FILIP1L, ALK-GMCL1, ALK-GPN1, ALK-GPR113, ALK-HADHA, ALK-HS1BP3, ALK-INTS9, ALK-ITGA6, ALK-KCTD18, ALK-KIF5C, ALK-KLC4, ALK-LINC00535, ALK-LRRFIP2, ALK-MAGOHB, ALK-MAMDC4, ALK-MANBA, ALK-MAP3K9, ALK-MED13L, ALK-METTL25, ALK-MTBP, ALK-MYH10, ALK-MYO5C, ALK-NFIA, ALK-NINJ2, ALK-OPRM1, ALK-OTX1, ALK-PAQR4, ALK-PDCD10, ALK-PDE3A, ALK-PELI1, ALK-PLEC, ALK-PTGER4, ALK-PTPRJ, ALK-QKI, ALK-RPS6KA5, ALK-SASH1, ALK-SEC16B, ALK-SKAP1, ALK-SLC25A13, ALK-SLC30A6, ALK-SNX17, ALK-SOX13, ALK-SRSF7, ALK-TANGO6, ALK-TG, ALK-TMCO3, ALK-TNS3, ALK-TRIM24, ALK-TTC28, ALK-UBE2L3, ALK-UBE3B, ALK-UTRN, ALK-VASP, ALK-WDR92, ALK-YPEL5, ALK-ZNF446, ALK-ZNF454, ALK-ZNF513, or ALK-ZSWIM2 fusion polypeptide described herein), or a fragment thereof, e.g., according to the methods of detection provided herein. In some embodiments, a detection reagent provided herein comprises an antibody or antibody fragment that specifically binds to an ALK fusion polypeptide of the disclosure, or to a fragment thereof.

### Baits

[0298] In some embodiments, nucleic acids corresponding to a gene involved in an ALK fusion nucleic acid molecule described herein, e.g., an ALK gene, and/or a corresponding gene fusion partner as described herein (e.g., in Tables 1-7, and/or in the Examples herein), are captured (e.g., from amplified nucleic acids) by hybridization with a bait molecule. Provided herein are bait molecules suitable for the detection of an ALK fusion nucleic acid molecule of the disclosure (e.g., an ALK-ABCB11, ALK-ACTN4, ALK-AGAP1, ALK-APH1A, ALK-AZI2, ALK-BTBD9, ALK-C2orf73, ALK-CAPN14, ALK-CARMIL1, ALK-CASP8, ALK-CDC42BPA, ALK-CIB4, ALK-CNTNAP5, ALK-COL3A1, ALK-CPQ, ALK-CPSF7, ALK-CREBBP, ALK-CTBP1, ALK-CTNND1, ALK-CYP51A1, ALK-CYS1, ALK-EPHA2, ALK-FHOD3, ALK-FILIP1L, ALK-GMCL1, ALK-GPN1, ALK-GPR113, ALK-HADHA, ALK-HS1BP3, ALK-INTS9, ALK-ITGA6, ALK-KCTD18, ALK-KIF5C, ALK-KLC4, ALK-LINC00535, ALK-LRRFIP2, ALK-MAGOHB, ALK-MAMDC4, ALK-MANBA, ALK-MAP3K9, ALK-MED13L, ALK-METTL25, ALK-MTBP, ALK-MYH10, ALK-MYO5C, ALK-NFIA, ALK-NINJ2, ALK-OPRM1, ALK-OTX1, ALK-PAQR4, ALK-PDCD10, ALK-PDE3A, ALK-PELI1, ALK-PLEC, ALK-PTGER4, ALK-PTPRJ, ALK-QKI, ALK-RPS6KA5, ALK-SASH1, ALK-SEC16B, ALK-SKAP1, ALK-SLC25A13, ALK-SLC30A6, ALK-SNX17, ALK-SOX13, ALK-SRSF7, ALK-TANGO6, ALK-TG, ALK-TMCO3, ALK-TNS3, ALK-TRIM24, ALK-TTC28, ALK-UBE2L3, ALK-UBE3B, ALK-UTRN, ALK-VASP, ALK-WDR92, ALK-YPEL5, ALK-ZNF446, ALK-ZNF454, ALK-ZNF513, or ALK-ZSWIM2 fusion nucleic acid molecule described herein).

[0299] In some embodiments, a bait molecule comprises a capture nucleic acid molecule configured to hybridize to a target nucleic acid molecule comprising an ALK fusion nucleic acid molecule of the disclosure, or a fragment or portion thereof. In some embodiments, the capture nucleic acid molecule is configured to hybridize to the ALK fusion nucleic acid molecule of the target nucleic acid molecule.

[0300] In some embodiments, the capture nucleic acid molecule is configured to hybridize to a fragment of an ALK fusion nucleic acid molecule of the disclosure. In some embodiments, the fragment comprises (or is) between about 5 and about 25 nucleotides, between about 5 and about 300 nucleotides, between about 100 and about 300 nucleotides, between about 130 and about 230 nucleotides, or between about 150 and about 200 nucleotides. In some embodiments, the fragment comprises (or is) about 100 nucleotides, about 125 nucleotides, about 150 nucleotides, about 175 nucleotides, about 200 nucleotides, about 225 nucleotides, about 250 nucleotides, about 275 nucleotides, or about 300 nucleotides in length. In some embodiments, the fragment comprises a breakpoint or fusion junction of an ALK fusion nucleic acid molecule of the disclosure.

[0301] In some embodiments, the capture nucleic acid molecule comprises (or is) between about 5 and about 25 nucleotides, between about 5 and about 300 nucleotides, between about 100 and about 300 nucleotides, between about 130 and about 230 nucleotides, or between about 150 and about 200 nucleotides. In some embodiments, the capture nucleic acid molecule comprises (or is) about 100 nucleotides, about 125 nucleotides, about 150 nucleotides, about 175 nucleotides, about 200 nucleotides, about 225 nucleotides, about 250 nucleotides, about 275 nucleotides, or about 300 nucleotides in length.

[0302] In some embodiments, the capture nucleic acid molecule is configured to hybridize to a breakpoint of an ALK fusion nucleic acid molecule of the disclosure, and may further hybridize to between about 10 and about 100 nucleotides or more, e.g., any of between about 10 and about 20, about 20 and about 30, about 30 and about 40, about 40 and about 50, about 50 and about 60, about 60 and about 70, about 70 and about 80, about 80 and about 90, or about 90 and about 100, or more nucleotides flanking either side of the breakpoint.

[0303] In some embodiments, the capture nucleic acid molecule is configured to hybridize to a nucleotide sequence in an intron or an exon of an ALK gene, or in a breakpoint joining the introns or exons of an ALK gene (e.g., plus or minus any of between about 10 and about 20, about 20 and about 30, about 30 and about 40, about 40 and about 50, about 50 and about 60, about 60 and about 70, about 70 and about 80, about 80 and about 90, or about 90 and about 100, or more nucleotides), and/or to an intron or exon of another gene (e.g., a corresponding gene fusion partner as described herein, e.g., in Tables 1-7, and/or in the Examples herein).

[0304] In some embodiments, the capture nucleic acid molecule is a DNA, RNA, or a DNA/RNA molecule. In some embodiments, the capture nucleic acid molecule comprises any of between about 50 and about 1000 nucleotides, between about 50 and about 500 nucleotides, between about 100 and about 500 nucleotides, between about 100 and about 300 nucleotides, between about 130 and about 230 nucleotides, or between about 150 and about 200 nucleotides. In some embodiments, the capture nucleic acid molecule comprises any of between about 50 nucleotides and about 100 nucleotides, about 100 nucleotides and about 150 nucleotides, about 150 nucleotides and about 200 nucleotides, about 200 nucleotides and about 250 nucleotides, about 250 nucleotides and about 300 nucleotides, about 300 nucleotides and about 350 nucleotides, about 350 nucleotides and about 400 nucleotides, about 400 nucleotides and about 450 nucleotides, about 450 nucleotides and about 500 nucleotides, about 500 nucleotides and about 550 nucleotides, about 550 nucleotides and about 600 nucleotides, about 600 nucleotides and about 650 nucleotides, about 650 nucleotides and about 700 nucleotides, about 700 nucleotides and about 750 nucleotides, about 750 nucleotides and about 800 nucleotides, about 800 nucleotides and about 850 nucleotides, about 850 nucleotides and about 900 nucleotides, about 900 nucleotides and about 950 nucleotides, or about 950 nucleotides and about 1000 nucleotides. In some embodiments, the capture nucleic acid molecule comprises between about 10 and about 30 nucleotides, between about 50 and about 1000 nucleotides, between about 100 and about 500 nucleotides, between about 100 and about 300 nucleotides, or between about 100 and about 200 nucleotides. In some embodiments, the capture nucleic acid molecule comprises about 150 nucleotides. In some embodiments, the capture nucleic acid molecule is about 150 nucleotides. In some embodiments, the capture nucleic acid molecule comprises about 170 nucleotides. In some embodiments, the capture nucleic acid molecule is about 170 nucleotides.

[0305] In some embodiments, a bait provided herein comprises a DNA, RNA, or a DNA/RNA molecule. In some embodiments, a bait provided herein includes a label, a tag or detection reagent. In some embodiments, the label, tag or detection reagent is a radiolabel, a fluorescent label, an enzymatic label, a sequence tag, biotin, or another ligand. In some embodiments, a bait provided herein includes a detection reagent such as a fluorescent marker. In some embodiments, a bait provided herein includes (e.g., is conjugated to) an affinity tag or reagent, e.g., that allows capture and isolation of a hybrid formed by a bait and a nucleic acid molecule hybridized to the bait. In some embodiments, the affinity tag or reagent is an antibody, an antibody fragment, biotin, or any other suitable affinity tag or reagent known in the art. In some embodiments, a bait is suitable for solution phase hybridization.

[0306] Baits can be produced and used according to methods known in the art, e.g., as described in WO2012092426A1 and/or or in Frampton et al (2013) Nat Biotechnol, 31:1023-1031, incorporated herein by reference. For example, biotinylated baits (e.g., RNA baits) can be produced by obtaining a pool of synthetic long oligonucleotides, originally synthesized on a microarray, and amplifying the oligonucleotides to produce the bait sequences. In some embodiments, the baits are produced by adding an RNA polymerase promoter sequence at one end of the bait sequences, and synthesizing RNA sequences using RNA polymerase. In one embodiment, libraries of synthetic oligodeoxynucleotides can be obtained from commercial suppliers, such as Agilent Technologies, Inc., and amplified using known nucleic acid amplification methods.

[0307] In some embodiments, a bait provided herein is between about 100 nucleotides and about 300 nucleotides. In some embodiments, a bait provided herein is between about 130 nucleotides and about 230 nucleotides. In some embodiments, a bait provided herein is between about 150 nucleotides and about 200 nucleotides. In some embodiments, a bait provided herein comprises a target-specific bait sequence (e.g., a capture nucleic acid molecule described herein) and universal tails on each end. In some embodiments, the target-specific sequence, e.g., a capture nucleic acid molecule described herein, is between about 40 nucleotides and about 300 nucleotides. In some embodiments, the target-specific sequence, e.g., a capture nucleic acid molecule described herein, is between about 100 nucleotides and about 200 nucleotides. In some embodiments, the target-specific sequence, e.g., a capture nucleic acid molecule described herein, is between about 120 nucleotides and about 170 nucleotides. In some embodiments, the target-specific sequence, e.g., a capture nucleic acid molecule described herein, is about 150 nucleotides or about 170 nucleotides. In some embodiments, a bait provided herein comprises an oligonucleotide comprising about 200 nucleotides, of which about 150 nucleotides or about 170 nucleotides are target-specific (e.g., a capture nucleic acid molecule described herein), and the other 50 nucleotides or 30 nucleotides (e.g., 25 or 15 nucleotides on each end of the bait) are universal arbitrary tails, e.g., suitable for PCR amplification.

[0308] In some embodiments, a bait provided herein hybridizes to a nucleotide sequence corresponding to an intron or an exon of one gene of an ALK fusion molecule described herein (e.g., an ALK gene), in an intron or an exon of the other gene of an ALK fusion molecule described herein (e.g., a corresponding gene fusion partner as described herein, e.g., in any of Tables 1-7, and/or in the Examples herein), and/or a breakpoint joining the introns and/or exons.

[0309] The baits described herein can be used for selection of exons and short target sequences.

[0310] In some embodiments, a bait of the disclosure distinguishes a nucleic acid molecule, e.g., a genomic or transcribed nucleic acid molecule, e.g., a cDNA or RNA, having a breakpoint of an ALK fusion nucleic acid molecule described herein from a reference nucleotide sequence, e.g., a nucleotide sequence not having the breakpoint.

[0311] In some embodiments, the bait hybridizes to a breakpoint of an ALK fusion nucleic acid molecule described herein and a sequence on either side of the breakpoint (e.g., any of 1, 2, 3, 4, 5, 6, 7, 8, 9, or 10 nucleotides on either side of the breakpoint, or any of between 1 and about 5, about 5 and about 10, about 10 and about 15, about 15 and about 20, about 20 and about 25, about 25 and about 30, about 30 and about 35, about 35 and about 40, about 40 and about 45, about 45 and about 50, about 50 and about 55, about 55 and about 60, about 60 and about 65, about 70 and about 75, about 75 and about 80, about 80 and about 85, about 85 and about 90, about 90 and about 95, or about 95 and about 100, or more nucleotides on either side of the breakpoint).

### Probes

[0312] Also provided herein are probes, e.g., nucleic acid molecules, suitable for the detection of an ALK fusion nucleic acid molecule of the disclosure (e.g., an ALK-ABCB11, ALK-ACTN4, ALK-AGAP1, ALK-APH1A, ALK-AZI2, ALK-BTBD9, ALK-C2orf73, ALK-CAPN14, ALK-CARMIL1, ALK-CASP8, ALK-CDC42BPA, ALK-CIB4, ALK-CNTNAP5, ALK-COL3A1, ALK-CPQ, ALK-CPSF7, ALK-CREBBP, ALK-CTBP1, ALK-CTNND1, ALK-CYP51A1, ALK-CYS1, ALK-EPHA2, ALK-FHOD3, ALK-FILIP1L, ALK-GMCL1, ALK-GPN1, ALK-GPR113, ALK-HADHA, ALK-HS1BP3, ALK-INTS9, ALK-ITGA6, ALK-KCTD18, ALK-KIF5C, ALK-KLC4, ALK-LINC00535, ALK-LRRFIP2, ALK-MAGOHB, ALK-MAMDC4, ALK-MANBA, ALK-MAP3K9, ALK-MED13L, ALK-METTL25, ALK-MTBP, ALK-MYH10, ALK-MYO5C, ALK-NFIA, ALK-NINJ2, ALK-OPRM1, ALK-OTX1, ALK-PAQR4, ALK-PDCD10, ALK-PDE3A, ALK-PELI1, ALK-PLEC, ALK-PTGER4, ALK-PTPRJ, ALK-QKI, ALK-RPS6KA5, ALK-SASH1, ALK-SEC16B, ALK-SKAP1, ALK-SLC25A13, ALK-SLC30A6, ALK-SNX17, ALK-SOX13, ALK-SRSF7, ALK-TANGO6, ALK-TG, ALK-TMCO3, ALK-TNS3, ALK-TRIM24, ALK-TTC28, ALK-UBE2L3, ALK-UBE3B, ALK-UTRN, ALK-VASP, ALK-WDR92, ALK-YPEL5, ALK-ZNF446, ALK-ZNF454, ALK-ZNF513, or ALK-ZSWIM2 fusion nucleic acid molecule described herein). In some embodiments, a probe provided herein comprises a nucleic acid sequence configured to hybridize to a target nucleic acid molecule that is or comprises an ALK fusion nucleic acid molecule of the disclosure, or a fragment or portion thereof. In some embodiments, the probe comprises a nucleic acid sequence configured to hybridize to the ALK fusion nucleic acid molecule of the disclosure, or the fragment or portion thereof, of the target nucleic acid molecule. In some embodiments, the probe comprises a nucleic acid sequence configured to hybridize to a fragment or portion of the ALK fusion nucleic acid molecule of the target nucleic acid molecule. In some embodiments, the fragment or portion comprises between about 5 and about 25 nucleotides, between about 5 and about 300 nucleotides, between about 100 and about 300 nucleotides, between about 130 and about 230 nucleotides, or between about 150 and about 200 nucleotides.

[0313] In some embodiments, the probe comprises a nucleotide sequence configured to hybridize to a breakpoint of an ALK fusion nucleic acid molecule of the disclosure, and may be further configured to hybridize to between about 10 and about 100 nucleotides or more, e.g., any of between about 10 and about 20, about 20 and about 30, about 30 and about 40, about 40 and about 50, about 50 and about 60, about 60 and about 70, about 70 and about 80, about 80 and about 90, or about 90 and about 100, or more nucleotides flanking either side of the breakpoint.

[0314] In some embodiments, the probe comprises a nucleotide sequence configured to hybridize to a nucleotide sequence in an intron or an exon of a gene involved in an ALK fusion nucleic acid molecule described herein, e.g., an ALK gene, or in a breakpoint joining the introns or exons of the gene (e.g., plus or minus any of between about 10 and about 20, about 20 and about 30, about 30 and about 40, about 40 and about 50, about 50 and about 60, about 60 and about 70, about 70 and about 80, about 80 and about 90, or about 90 and about 100, or more nucleotides), and/or to an intron or exon of another gene (e.g., a corresponding gene fusion partner as described herein, e.g., in any of Tables 1-7, and/or in the Examples herein).

[0315] In some embodiments, the probe comprises a nucleic acid molecule which is a DNA, RNA, or a DNA/RNA molecule. In some embodiments, the probe comprises a nucleic acid molecule comprising any of between about 10 and about 20 nucleotides, between about 12 and about 20 nucleotides, between about 10 and about 1000 nucleotides, between about 50 and about 500 nucleotides, between about 100 and about 500 nucleotides, between about 100 and about 300 nucleotides, between about 130 and about 230 nucleotides, or between about 150 and about 200 nucleotides. In some embodiments, the probe comprises a nucleic acid molecule comprising any of 10 nucleotides, 11 nucleotides, 12 nucleotides, 13 nucleotides, 14 nucleotides, 15 nucleotides, 16 nucleotides, 17 nucleotides, 18 nucleotides, 19 nucleotides, 20 nucleotides, 21 nucleotides, 22 nucleotides, 23 nucleotides, 24 nucleotides, 25 nucleotides, 26 nucleotides, 27 nucleotides, 28 nucleotides, 29 nucleotides, or 30 nucleotides. In some embodiments, the probe comprises a nucleic acid molecule comprising any of between about 40 nucleotides and about 50 nucleotides, about 50 nucleotides and about 100 nucleotides, about 100 nucleotides and about 150 nucleotides, about 150 nucleotides and about 200 nucleotides, about 200 nucleotides and about 250 nucleotides, about 250 nucleotides and about 300 nucleotides, about 300 nucleotides and about 350 nucleotides, about 350 nucleotides and about 400 nucleotides, about 400 nucleotides and about 450 nucleotides, about 450 nucleotides and about 500 nucleotides, about 500 nucleotides and about 550 nucleotides, about 550 nucleotides and about 600 nucleotides, about 600 nucleotides and about 650 nucleotides, about 650 nucleotides and about 700 nucleotides, about 700 nucleotides and about 750 nucleotides, about 750 nucleotides and about 800 nucleotides, about 800 nucleotides and about 850 nucleotides, about 850 nucleotides and about 900 nucleotides, about 900 nucleotides and about 950 nucleotides, or about 950 nucleotides and about 1000 nucleotides. In some embodiments, the probe comprises a nucleic acid molecule comprising between about 12 and about 20 nucleotides.

[0316] In some embodiments, a probe provided herein comprises a DNA, RNA, or a DNA/RNA molecule. In some embodiments, a probe provided herein includes a label or a tag. In some embodiments, the label or tag is a radiolabel (e.g., a radioisotope), a fluorescent label (e.g., a fluorescent compound), an enzymatic label, an enzyme co-factor, a sequence tag, biotin, or another ligand. In some embodiments, a probe provided herein includes a detection reagent such as a fluorescent marker. In some embodiments, a probe provided herein includes (e.g., is conjugated to) an affinity tag, e.g., that allows capture and isolation of a hybrid formed by a probe and a nucleic acid molecule hybridized to the probe. In some embodiments, the affinity tag is an antibody, an antibody fragment, biotin, or any other suitable affinity tag or reagent known in the art. In some embodiments, a probe is suitable for solution phase hybridization.

[0317] In some embodiments, probes provided herein may be used according to the methods of detection of ALK fusion nucleic acid molecules provided herein. For example, a probe provided herein may be used for detecting an ALK fusion nucleic acid molecule of the disclosure in a sample, e.g., a sample obtained from an individual. In some embodiments, the probe may be used for identifying cells or tissues that express an ALK fusion nucleic acid molecule of the disclosure, e.g., by measuring levels of the ALK fusion nucleic acid molecule. In some embodiments, the probe may be used for detecting levels of an ALK fusion nucleic acid molecule of the disclosure, e.g., mRNA levels, in a sample of cells from an individual.

[0318] In some embodiments, a probe provided herein specifically hybridizes to a nucleic acid molecule comprising a rearrangement (e.g., a deletion, inversion, insertion, duplication, or other rearrangement) resulting in an ALK fusion nucleic acid molecule of the disclosure.

[0319] In some embodiments, a probe of the disclosure distinguishes a nucleic acid, e.g., a genomic or transcribed nucleic acid, e.g., a cDNA or RNA, having a breakpoint of an ALK fusion nucleic acid molecule of the disclosure, from a reference nucleotide sequence, e.g., a nucleotide sequence not having the breakpoint.

[0320] Also provided herein are isolated pairs of allele-specific probes, wherein, for example, the first probe of the pair specifically hybridizes to an ALK fusion nucleic acid molecule of the disclosure, and the second probe of the pair specifically hybridizes to a corresponding wild type sequence. Probe pairs can be designed and produced for any of the ALK fusion nucleic acid molecules described herein and are useful in detecting a somatic mutation in a sample. In some embodiments, a first probe of a pair specifically hybridizes to a mutation (e.g., the breakpoint of an alteration, rearrangement, inversion, duplication, deletion, insertion or translocation resulting in an ALK fusion nucleic acid molecule described herein), and a second probe of a pair specifically hybridizes to a sequence upstream or downstream of the mutation.

[0321] In some embodiments, one or more probes provided herein are suitable for use in in situ hybridization methods, e.g., as described above, such as FISH.

[0322] Chromosomal probes, e.g., for use in the FISH methods described herein, are typically about 50 to about 10′ nucleotides in length. Longer probes typically comprise smaller fragments of about 100 to about 500 nucleotides. Probes that hybridize with centromeric DNA and locus-specific DNA are available commercially, for example, from Vysis, Inc. (Downers Grove, Ill.), Molecular Probes, Inc. (Eugene, Oreg.) or from Cytocell (Oxfordshire, UK). Alternatively, probes can be made non-commercially from chromosomal or genomic DNA through standard techniques. For example, sources of DNA that can be used include genomic DNA, cloned DNA sequences, somatic cell hybrids that contain one, or a part of one, chromosome (e.g., human chromosome) along with the normal chromosome complement of the host, and chromosomes purified by flow cytometry or microdissection. The region of interest can be isolated through cloning, or by site-specific amplification via the polymerase chain reaction (PCR). Probes of the disclosure may also hybridize to RNA molecules, e.g., mRNA, such as an RNA that is or comprises an ALK fusion nucleic acid molecule of the disclosure.

[0323] In some embodiments, probes, such as probes for use in the FISH methods described herein, are used for determining whether a cytogenetic abnormality is present in one or more cells, e.g., in a region of a chromosome or an RNA bound by one or more probes provided herein. The cytogenetic abnormality may be a cytogenetic abnormality that results in an ALK fusion nucleic acid molecule of the disclosure. Examples of such cytogenetic abnormalities include, without limitation, deletions (e.g., deletions of entire chromosomes or deletions of fragments of one or more chromosomes), duplications (e.g., of entire chromosomes, or of regions smaller than an entire chromosome), translocations (e.g., non-reciprocal translocations, balanced translocations, reciprocal translocations), intra-chromosomal inversions, point mutations, deletions, gene copy number changes, germ-line mutations, and gene expression level changes.

[0324] In some embodiments, probes, such as probes for use in the FISH methods described herein, are labeled such that a chromosomal region or a region on an RNA to which the probes hybridize can be detected. Probes typically are directly labeled with a fluorophore, allowing the probe to be visualized without a secondary detection molecule. Probes can also be labeled by nick translation, random primer labeling or PCR labeling. Labeling may be accomplished using fluorescent (direct)- or haptene (indirect)-labeled nucleotides. Representative, non-limiting examples of labels include: AMCA-6-dUTP, CascadeBlue-4-dUTP, Fluorescein-12-dUTP, Rhodamine-6-dUTP, TexasRed-6-dUTP, Cy3-6-dUTP, Cy5-dUTP, Biotin(BIO)-11-dUTP, Digoxygenin(DIG)-11-dUTP and Dinitrophenyl (DNP)-11-dUTP. Probes can also be indirectly labeled with biotin or digoxygenin, or labeled with radioactive isotopes such as ³²P and ³H, and secondary detection molecules may be used, or further processing may be performed, to visualize the probes. For example, a probe labeled with biotin can be detected by avidin conjugated to a detectable marker, e.g., avidin can be conjugated to an enzymatic marker such as alkaline phosphatase or horseradish peroxidase. Enzymatic markers can be detected in standard colorimetric reactions using a substrate and/or a catalyst for the enzyme. Catalysts for alkaline phosphatase include 5-bromo-4-chloro-3-indolylphosphate and nitro blue tetrazolium. Diaminobenzoate can be used as a catalyst for horseradish peroxidase. Probes can also be prepared such that a fluorescent or other label is added after hybridization of the probe to its target to detect that the probe hybridized to the target. For example, probes can be used that have antigenic molecules incorporated into the nucleotide sequence. After hybridization, these antigenic molecules are detected, for example, using specific antibodies reactive with the antigenic molecules. Such antibodies can, for example, themselves incorporate a fluorochrome, or can be detected using a second antibody with a bound fluorochrome. For fluorescent probes, e.g., used in FISH techniques, fluorescence can be viewed with a fluorescence microscope equipped with an appropriate filter for each fluorophore, or by using dual or triple band-pass filter sets to observe multiple fluorophores. Alternatively, techniques such as flow cytometry can be used to examine the hybridization pattern of the chromosomal probes.

[0325] In some embodiments, the probe hybridizes to a breakpoint of an ALK fusion nucleic acid molecule of the disclosure, and a sequence on either side of the breakpoint (e.g., any of 1, 2, 3, 4, 5, 6, 7, 8, 9, or 10 nucleotides on either side of the breakpoint, or any of between 1 and about 5, about 5 and about 10, about 10 and about 15, about 15 and about 20, about 20 and about 25, about 25 and about 30, about 30 and about 35, about 35 and about 40, about 40 and about 45, about 45 and about 50, about 50 and about 55, about 55 and about 60, about 60 and about 65, about 70 and about 75, about 75 and about 80, about 80 and about 85, about 85 and about 90, about 90 and about 95, or about 95 and about 100, or more nucleotides on either side of the breakpoint).

### Oligonucleotides

[0326] In some aspects, provided herein are oligonucleotides, e.g., useful as primers. In some embodiments, an oligonucleotide, e.g., a primer, provided herein comprises a nucleotide sequence configured to hybridize to a target nucleic acid molecule that is or comprises an ALK fusion nucleic acid molecule of the disclosure (e.g., an ALK-ABCB11, ALK-ACTN4, ALK-AGAP1, ALK-APH1A, ALK-AZI2, ALK-BTBD9, ALK-C2orf73, ALK-CAPN14, ALK-CARMIL1, ALK-CASP8, ALK-CDC42BPA, ALK-CIB4, ALK-CNTNAP5, ALK-COL3A1, ALK-CPQ, ALK-CPSF7, ALK-CREBBP, ALK-CTBP1, ALK-CTNND1, ALK-CYP51A1, ALK-CYS1, ALK-EPHA2, ALK-FHOD3, ALK-FILIP1L, ALK-GMCL1, ALK-GPN1, ALK-GPR113, ALK-HADHA, ALK-HS1BP3, ALK-INTS9, ALK-ITGA6, ALK-KCTD18, ALK-KIF5C, ALK-KLC4, ALK-LINC00535, ALK-LRRFIP2, ALK-MAGOHB, ALK-MAMDC4, ALK-MANBA, ALK-MAP3K9, ALK-MED13L, ALK-METTL25, ALK-MTBP, ALK-MYH10, ALK-MYOSC, ALK-NFIA, ALK-NINJ2, ALK-OPRM1, ALK-OTX1, ALK-PAQR4, ALK-PDCD10, ALK-PDE3A, ALK-PELI1, ALK-PLEC, ALK-PTGER4, ALK-PTPRJ, ALK-QKI, ALK-RPS6KA5, ALK-SASH1, ALK-SEC16B, ALK-SKAP1, ALK-SLC25A13, ALK-SLC30A6, ALK-SNX17, ALK-SOX13, ALK-SRSF7, ALK-TANGO6, ALK-TG, ALK-TMCO3, ALK-TNS3, ALK-TRIM24, ALK-TTC28, ALK-UBE2L3, ALK-UBE3B, ALK-UTRN, ALK-VASP, ALK-WDR92, ALK-YPEL5, ALK-ZNF446, ALK-ZNF454, ALK-ZNF513, or ALK-ZSWIM2 fusion nucleic acid molecule described herein), or a fragment or portion thereof. In some embodiments, the oligonucleotide comprises a nucleotide sequence configured to hybridize to the ALK fusion nucleic acid molecule of the target nucleic acid molecule. In some embodiments, the oligonucleotide comprises a nucleotide sequence configured to hybridize to a fragment or portion of the ALK fusion nucleic acid molecule of the target nucleic acid molecule.

[0327] In some embodiments, the oligonucleotide, e.g., the primer, comprises a nucleotide sequence configured to hybridize to a breakpoint of an ALK fusion nucleic acid molecule of the disclosure, and may be further configured to hybridize to between about 10 and about 12, about 12 and about 15, about 15 and about 17, about 17 and about 20, about 20 and about 25, or about 25 and about 30, or more nucleotides flanking either side of the breakpoint.

[0328] In some embodiments, the oligonucleotide, e.g., the primer, comprises a nucleotide sequence configured to hybridize to a nucleotide sequence in an intron or an exon of a gene involved in an ALK fusion nucleic acid mole of the disclosure (e.g., an ALK gene), to a breakpoint of a fusion nucleic acid molecule described herein, and/or to an intron or exon of another gene (e.g., a corresponding gene fusion partner as described herein, e.g., in any of Tables 1-7, and/or in the Examples herein).

[0329] In some embodiments, the oligonucleotide comprises a nucleotide sequence corresponding to an ALK fusion nucleic acid molecule of the disclosure. In some embodiments, the oligonucleotide comprises a nucleotide sequence corresponding to a fragment or a portion of the ALK fusion nucleic acid molecule. In some embodiments, the fragment or portion comprises between about 10 and about 30 nucleotides, between about 12 and about 20 nucleotides, or between about 12 and about 17 nucleotides. In some embodiments, the oligonucleotide comprises a nucleotide sequence complementary to an ALK fusion nucleic acid molecule provided herein. In some embodiments, the oligonucleotide comprises a nucleotide sequence complementary to a fragment or a portion of the ALK fusion nucleic acid molecule provided herein. In some embodiments, the fragment or portion comprises between about 10 and about 30 nucleotides, between about 12 and about 20 nucleotides, or between about 12 and about 17 nucleotides.

[0330] In some embodiments, an oligonucleotide, e.g., a primer, provided herein comprises a nucleotide sequence that is sufficiently complementary to its target nucleotide sequence such that the oligonucleotide specifically hybridizes to a nucleic acid molecule comprising the target nucleotide sequence, e.g., under high stringency conditions. In some embodiments, an oligonucleotide, e.g., a primer, provided herein comprises a nucleotide sequence that is sufficiently complementary to its target nucleotide sequence such that the oligonucleotide specifically hybridizes to a nucleic acid molecule comprising the target nucleotide sequence under conditions that allow a polymerization reaction (e.g., PCR) to occur.

[0331] In some embodiments, an oligonucleotide, e.g., a primer, provided herein may be useful for initiating DNA synthesis via PCR (polymerase chain reaction) or a sequencing method. In some embodiments, the oligonucleotide may be used to amplify a nucleic acid molecule that is or comprises an ALK fusion nucleic acid molecule of the disclosure, or a fragment thereof, e.g., using PCR. In some embodiments, the oligonucleotide may be used to sequence a nucleic acid molecule that is or comprises an ALK fusion nucleic acid molecule provided herein, or a fragment thereof. In some embodiments, the oligonucleotide may be used to amplify a nucleic acid molecule comprising a breakpoint of an ALK fusion nucleic acid molecule described herein, e.g., using PCR. In some embodiments, the oligonucleotide may be used to sequence a nucleic acid molecule comprising a breakpoint of an ALK fusion nucleic acid molecule described herein.

[0332] In some embodiments, pairs of oligonucleotides, e.g., pairs of primers, are provided herein, which are configured to hybridize to a nucleic acid molecule that is or comprises an ALK fusion nucleic acid molecule of the disclosure, or a fragment thereof. In some embodiments, a pair of oligonucleotides of the disclosure may be used for directing amplification of the ALK fusion nucleic acid molecule or fragment thereof, e.g., using a PCR reaction. In some embodiments, pairs of oligonucleotides, e.g., pairs of primers, are provided herein, which are configured to hybridize to a nucleic acid molecule comprising a breakpoint of an ALK fusion nucleic acid molecule described herein, e.g., for use in directing amplification of the corresponding fusion nucleic acid molecule or fragment thereof, e.g., using a PCR reaction.

[0333] In some embodiments, an oligonucleotide, e.g., a primer, provided herein is a single stranded nucleic acid molecule, e.g., for use in sequencing or amplification methods. In some embodiments, an oligonucleotide provided herein is a double stranded nucleic acid molecule. In some embodiments, a double stranded oligonucleotide is treated, e.g., denatured, to separate its two strands prior to use, e.g., in sequencing or amplification methods. Oligonucleotides provided herein comprise a nucleotide sequence of sufficient length to hybridize to their target, e.g., an ALK fusion nucleic acid molecule of the disclosure, or a fragment thereof, and to prime the synthesis of extension products, e.g., during PCR or sequencing.

[0334] In some embodiments, an oligonucleotide, e.g., a primer, provided herein comprises 5, 6, 7, 8, 9, 10, 11, 12, 13, 14, 15, 16, 17, 18, 19, 20, 21, 22, 23, 24, 25, 26, 27, 28, 29, 30, 31, 32, 33, 34, 35, 36, 37, 38, 39, 40, 41, 42, 43, 44, 45, 46, 47, 48, 49, 50, 51, 52, 53, 54, 55, 56, 57, 58, 59, 60, 61, 62, 63, 64, 65, 66, 67, 68, 69, 70, 71, 72, 73, 74, 75, 76, 77, 78, 79, 80, 81, 82, 83, 84, 85, 86, 87, 88, 89, 90, 91, 92, 93, 94, 95, 96, 97, 98, 99, 100, or more deoxyribonucleotides or ribonucleotides. In some embodiments, an oligonucleotide provided herein comprises at least about 8 deoxyribonucleotides or ribonucleotides. In some embodiments, an oligonucleotide provided herein comprises at least about 10 deoxyribonucleotides or ribonucleotides. In some embodiments, an oligonucleotide provided herein comprises at least about 12 deoxyribonucleotides or ribonucleotides. In some embodiments, an oligonucleotide provided herein comprises at least about 15 deoxyribonucleotides or ribonucleotides. In some embodiments, an oligonucleotide provided herein comprises at least about 20 deoxyribonucleotides or ribonucleotides. In some embodiments, an oligonucleotide provided herein comprises at least about 30 deoxyribonucleotides or ribonucleotides. In some embodiments, an oligonucleotide provided herein comprises between about 10 and about 30 deoxyribonucleotides or ribonucleotides. In some embodiments, an oligonucleotide provided herein comprises between about 10 and about 25 deoxyribonucleotides or ribonucleotides. In some embodiments, an oligonucleotide provided herein comprises between about 10 and about 20 deoxyribonucleotides or ribonucleotides. In some embodiments, an oligonucleotide provided herein comprises between about 10 and about 15 deoxyribonucleotides or ribonucleotides. In some embodiments, an oligonucleotide provided herein comprises between about 12 and about 20 deoxyribonucleotides or ribonucleotides. In some embodiments, an oligonucleotide provided herein comprises between about 17 and about 20 deoxyribonucleotides or ribonucleotides. In some embodiments, the length and nucleotide sequence of an oligonucleotide provided herein is determined according to methods known in the art, e.g., based on factors such as the specific application (e.g., PCR, sequencing library preparation, sequencing), reaction conditions (e.g., buffers, temperature), and the nucleotide composition of the nucleotide sequence of the oligonucleotide or of its target complementary sequence.

[0335] In some embodiments, an oligonucleotide, e.g., a primer, of the disclosure distinguishes a nucleic acid, e.g., a genomic or transcribed nucleic acid, e.g., a cDNA or RNA, having a breakpoint of an ALK fusion nucleic acid molecule described herein, from a reference nucleotide sequence, e.g., a nucleotide sequence not having the breakpoint.

[0336] In one aspect, provided herein is a primer or primer set for amplifying a nucleic acid molecule comprising a cytogenetic abnormality such as an alteration, rearrangement, chromosomal inversion, deletion, translocation, duplication, or other rearrangement resulting in an ALK fusion nucleic acid molecule of the disclosure. In another aspect, provided herein is a primer or primer set for amplifying a nucleic acid molecule comprising an alteration, rearrangement, chromosomal inversion, insertion, deletion, translocation, duplication or other rearrangement resulting in an ALK fusion nucleic acid molecule of the disclosure. In certain aspects, provided herein are allele-specific oligonucleotides, e.g., primers, wherein a first oligonucleotide of a pair specifically hybridizes to a mutation (e.g., a breakpoint of an ALK fusion nucleic acid molecule described herein), and a second oligonucleotide of a pair specifically hybridizes to a sequence upstream or downstream of the mutation. In certain aspects, provided herein are pairs of oligonucleotides, e.g., primers, wherein a first oligonucleotide of a pair specifically hybridizes to a sequence upstream of a mutation (e.g., a breakpoint of an ALK fusion nucleic acid molecule described herein), and a second oligonucleotide of the pair specifically hybridizes to a sequence downstream of the mutation.

[0337] In some embodiments, the oligonucleotide, e.g., the primer, hybridizes to a breakpoint of an ALK fusion nucleic acid molecule described herein, and a sequence on either side of the breakpoint (e.g., any of 1, 2, 3, 4, 5, 6, 7, 8, 9, or 10 nucleotides on either side of the breakpoint, or any of between 1 and about 5, about 5 and about 10, about 10 and about 15, about 15 and about 20, about 20 and about 25, about 25 and about 30, about 30 and about 35, about 35 and about 40, about 40 and about 45, about 45 and about 50, about 50 and about 55, about 55 and about 60, about 60 and about 65, about 70 and about 75, about 75 and about 80, about 80 and about 85, about 85 and about 90, about 90 and about 95, or about 95 and about 100, or more nucleotides on either side of the breakpoint).

### Antibodies

[0338] Provided herein are antibodies or antibody fragments that specifically bind to an ALK fusion polypeptide of the disclosure (e.g., an ALK-ABCB11, ALK-ACTN4, ALK-AGAP1, ALK-APH1A, ALK-AZI2, ALK-BTBD9, ALK-C2orf73, ALK-CAPN14, ALK-CARMIL1, ALK-CASP8, ALK-CDC42BPA, ALK-CIB4, ALK-CNTNAP5, ALK-COL3A1, ALK-CPQ, ALK-CPSF7, ALK-CREBBP, ALK-CTBP1, ALK-CTNND1, ALK-CYP51A1, ALK-CYS1, ALK-EPHA2, ALK-FHOD3, ALK-FILIP1L, ALK-GMCL1, ALK-GPN1, ALK-GPR113, ALK-HADHA, ALK-HS1BP3, ALK-INTS9, ALK-ITGA6, ALK-KCTD18, ALK-KIF5C, ALK-KLC4, ALK-LINC00535, ALK-LRRFIP2, ALK-MAGOHB, ALK-MAMDC4, ALK-MANBA, ALK-MAP3K9, ALK-MED13L, ALK-METTL25, ALK-MTBP, ALK-MYH10, ALK-MYO5C, ALK-NFIA, ALK-NINJ2, ALK-OPRM1, ALK-OTX1, ALK-PAQR4, ALK-PDCD10, ALK-PDE3A, ALK-PELI1, ALK-PLEC, ALK-PTGER4, ALK-PTPRJ, ALK-QKI, ALK-RPS6KA5, ALK-SASH1, ALK-SEC16B, ALK-SKAP1, ALK-SLC25A13, ALK-SLC30A6, ALK-SNX17, ALK-SOX13, ALK-SRSF7, ALK-TANGO6, ALK-TG, ALK-TMCO3, ALK-TNS3, ALK-TRIM24, ALK-TTC28, ALK-UBE2L3, ALK-UBE3B, ALK-UTRN, ALK-VASP, ALK-WDR92, ALK-YPEL5, ALK-ZNF446, ALK-ZNF454, ALK-ZNF513, or ALK-ZSWIM2 fusion polypeptide described herein), or a fragment thereof.

[0339] The antibody may be of any suitable type of antibody, including, but not limited to, a monoclonal antibody, a polyclonal antibody, a multi-specific antibody (e.g., a bispecific antibody), or an antibody fragment, so long as the antibody or antibody fragment exhibits a specific antigen binding activity, e.g., binding to an ALK fusion polypeptide of the disclosure, or a fragment thereof.

[0340] In some embodiments, a fusion polypeptide of the disclosure, or a fragment thereof, is used as an immunogen to generate one or more antibodies of the disclosure, e.g., using standard techniques for polyclonal and monoclonal antibody preparation. In some embodiments, an ALK fusion polypeptide provided herein, is used to provide antigenic peptide fragments (e.g., comprising any of at least about 8, at least about 10, at least about 15, at least about 20, at least about 30 or more amino acids) for use as immunogens to generate one or more antibodies of the disclosure, e.g., using standard techniques for polyclonal and monoclonal antibody preparation. As is known in the art, an antibody of the disclosure may be prepared by immunizing a suitable (i.e., immunocompetent) subject such as a rabbit, goat, mouse, or other mammal or vertebrate. An appropriate immunogenic preparation can contain, for example, recombinantly-expressed or chemically-synthesized polypeptides, e.g., an ALK fusion polypeptide of the disclosure, or a fragment thereof. The preparation can further include an adjuvant, such as Freund's complete or incomplete adjuvant, or a similar immunostimulatory agent.

[0341] In some embodiments, an antibody provided herein is a polyclonal antibody. Methods of producing polyclonal antibodies are known in the art. In some embodiments, an antibody provided herein is a monoclonal antibody, wherein a population of the antibody molecules contain only one species of an antigen binding site capable of immunoreacting or binding with a particular epitope, e.g., an epitope on an ALK fusion polypeptide provided herein. Methods of preparation of monoclonal antibodies are known in the art, e.g., using standard hybridoma techniques originally described by Kohler and Milstein (1975) Nature 256:495-497, human B cell hybridoma techniques (see Kozbor et al., 1983, Immunol. Today 4:72), EBV-hybridoma techniques (see Cole et al., pp. 77-96 In Monoclonal Antibodies and Cancer Therapy, Alan R. Liss, Inc., 1985), or trioma techniques. The technology for producing hybridomas is well known (see generally Current Protocols in Immunology, Coligan et al. ed., John Wiley & Sons, New York, 1994). A monoclonal antibody of the disclosure may also be identified and isolated by screening a recombinant combinatorial immunoglobulin library (e.g., an antibody phage display library) with the polypeptide of interest, e.g., an ALK fusion polypeptide provided herein or a fragment thereof. Kits for generating and screening phage display libraries are commercially available (e.g., the Pharmacia Recombinant Phage Antibody System, Catalog No. 27-9400-01; and the Stratagene SurfZAP Phage Display Kit, Catalog No. 240612). Additionally, examples of methods and reagents particularly amenable for use in generating and screening antibody display libraries can be found in, for example, U.S. Pat. No. 5,223,409; PCT Publication No. WO 92/18619; PCT Publication No. WO 91/17271; PCT Publication No. WO 92/20791; PCT Publication No. WO 92/15679; PCT Publication No. WO 93/01288; PCT Publication No. WO 92/01047; PCT Publication No. WO 92/09690; PCT Publication No. WO 90/02809; Fuchs et al. (1991) Bio/Technology 9:1370-1372; Hay et al. (1992) Hum. Antibod. Hybridomas 3:81-85; Huse et al. (1989) Science 246:1275-1281; and Griffiths et al. (1993) EMBO J. 12:725-734. In some embodiments, monoclonal antibodies of the disclosure are recombinant antibodies, such as chimeric and humanized monoclonal antibodies, comprising both human and non-human portions. Such chimeric and/or humanized monoclonal antibodies can be produced by recombinant DNA techniques known in the art, for example, using methods described in PCT Publication No. WO 87/02671; European Patent Application 184,187; European Patent Application 171,496; European Patent Application 173,494; PCT Publication No. WO 86/01533; U.S. Pat. No. 4,816,567; European Patent Application 125,023; Better et al. (1988) Science 240:1041-1043; Liu et al. (1987) Proc. Natl. Acad. Sci. USA 84:3439-3443; Liu et al. (1987) J. Immunol. 139:3521-3526; Sun et al. (1987) Proc. Natl. Acad. Sci. USA 84:214-218; Nishimura et al. (1987) Cancer Res. 47:999-1005; Wood et al. (1985) Nature 314:446-449; Shaw et al. (1988) J. Natl. Cancer Inst. 80:1553-1559; Morrison (1985) Science 229:1202-1207; Oi et al. (1986) Bio/Techniques 4:214; U.S. Pat. No. 5,225,539; Jones et al. (1986) Nature 321:552-525; Verhoeyan et al. (1988) Science 239:1534; and Beidler et al. (1988) J. Immunol. 141:4053-4060. In some embodiments, a monoclonal antibody of the disclosure is a human monoclonal antibody. In some embodiments, human monoclonal antibodies are prepared using methods known in the art, e.g., using transgenic mice which are incapable of expressing endogenous immunoglobulin heavy and light chains genes, but which can express human heavy and light chain genes. For an overview of this technology for producing human antibodies, see Lonberg and Huszar (1995) Int. Rev. Immunol. 13:65-93. For a detailed discussion of this technology for producing human antibodies and human monoclonal antibodies, and protocols for producing such antibodies, see, e.g., U.S. Pat. Nos. 5,625,126; 5,633,425; 5,569,825; 5,661,016; and U.S. Pat. No. 5,545,806.

[0342] In some embodiments, the antibody or antibody fragment of the disclosure is an isolated antibody or antibody fragment, which has been separated from a component of its natural environment or a cell culture used to produce the antibody or antibody fragment. In some embodiments, an antibody of the disclosure is purified to greater than 95% or 99% purity as determined by, for example, electrophoretic (e.g., SDS-PAGE, isoelectric focusing (IEF), capillary electrophoresis) or chromatographic (e.g., ion exchange or reverse phase HPLC) methods.

[0343] In some embodiments, an antibody of the disclosure can be used to isolate an ALK fusion polypeptide provided herein, or a fragment thereof, by standard techniques, such as affinity chromatography or immunoprecipitation. In some embodiments, an antibody of the disclosure can be used to detect an ALK fusion polypeptide provided herein, or a fragment thereof, e.g., in a tissue sample, cellular lysate, or cell supernatant, in order to evaluate the level and/or pattern of expression of the fusion polypeptide. Detection can be facilitated by coupling the antibody to a detectable substance. Thus, in some embodiments, an antibody of the disclosure is coupled to a detectable substance, such as enzymes, prosthetic groups, fluorescent materials, luminescent materials, bioluminescent materials, and radioactive materials. Non-limiting examples of suitable enzymes include, e.g., horseradish peroxidase, alkaline phosphatase, β-galactosidase, or acetylcholinesterase; examples of suitable prosthetic group complexes include, e.g., streptavidin/biotin and avidin/biotin; examples of suitable fluorescent materials include, e.g., umbelliferone, fluorescein, fluorescein isothiocyanate, rhodamine, dichlorotriazinylamine fluorescein, dansyl chloride or phycoerythrin; an example of a luminescent material includes, but is not limited to, luminol; examples of bioluminescent materials include, e.g., luciferase, luciferin, and aequorin; and examples of suitable radioactive materials include, e.g., ²I, ¹³¹I, ³⁵S or ³H.

[0344] An antibody or antibody fragment of the disclosure may also be used diagnostically, e.g., to detect and/or monitor protein levels (e.g., protein levels of an ALK fusion polypeptide provided herein) in tissues or body fluids (e.g., in a tumor cell-containing tissue or body fluid), e.g., according to the methods provided herein.

[0345] In certain embodiments, an antibody provided herein has a dissociation constant (Kd) of ≤1 μM, ≤100 nM, ≤10 nM, ≤1 nM, ≤0.1 nM, ≤0.01 nM, or ≤0.001 nM (e.g., 10⁻⁸M or less, e.g., from 10⁻⁸ M to 10⁻¹³ M, e.g., from 10⁻⁹ M to 10⁻¹³ M). Methods of measuring antibody affinity (e.g., Kd) are known in the art, and include, without limitation, a radiolabeled antigen binding assay (RIA) and a BIACORE® surface plasmon resonance assay. In some embodiments, antibody affinity (e.g., Kd) is determined using the Fab version of an antibody of the disclosure and its antigen (e.g., an ALK fusion polypeptide provided herein). In some embodiments, a RIA is performed with the Fab version of an antibody of the disclosure and its antigen (e.g., an ALK fusion polypeptide provided herein).

[0346] In certain embodiments, an antibody provided herein is an antibody fragment. Antibody fragments include, but are not limited to, Fab, Fab′, Fab′-SH, F(ab′)₂, Fv, and single-chain antibody molecule (e.g., scFv) fragments, and other fragments described herein or known in the art.

[0347] In certain embodiments, an antibody provided herein is a diabody. Diabodies are antibody fragments with two antigen-binding sites that may be bivalent or bispecific. In certain embodiments, an antibody provided herein is a triabody or a tetrabody.

[0348] In certain embodiments, an antibody provided herein is a single-domain antibody. Single-domain antibodies are antibody fragments comprising all or a portion of the heavy chain variable domain or all or a portion of the light chain variable domain of an antibody. In certain embodiments, a single-domain antibody is a human single-domain antibody.

[0349] Antibody fragments can be made by various techniques, including but not limited to proteolytic digestion of an intact antibody, as well as production by recombinant host cells (e.g., E. coli or phage), as known in the art and as described herein.

[0350] In certain embodiments, an antibody provided herein is a chimeric antibody. In one example, a chimeric antibody comprises a non-human variable region (e.g., a variable region derived from a mouse, rat, hamster, rabbit, or non-human primate, such as a monkey), and a human constant region. In a further example, a chimeric antibody is a “class switched” antibody, in which the class or subclass of the antibody has been changed from that of the parent antibody. Chimeric antibodies include antigen-binding fragments thereof.

[0351] In certain embodiments, a chimeric antibody is a humanized antibody. Typically, a non-human antibody is humanized to reduce immunogenicity to humans, while retaining the specificity and affinity of the parental non-human antibody. Generally, a humanized antibody comprises one or more variable domains in which HVRs, e.g., CDRs, (or portions thereof), are derived from a non-human antibody, and framework regions (FRs) (or portions thereof) are derived from human antibody sequences. A humanized antibody optionally will also comprise at least a portion of a human constant region. In some embodiments, some FR residues in a humanized antibody are substituted with corresponding residues from a non-human antibody (e.g., the antibody from which the HVR residues are derived), e.g., to restore or improve antibody specificity or affinity. Humanized antibodies and methods of making them are known in the art. Human framework regions that may be used for humanization include but are not limited to: framework regions selected using the “best-fit” method; framework regions derived from the consensus sequence of human antibodies of a particular subgroup of light or heavy chain variable regions; human mature (somatically mutated) framework regions or human germline framework regions; and framework regions derived from screening FR libraries.

[0352] In certain embodiments, an antibody provided herein is a human antibody. Human antibodies can be produced using various techniques known in the art. For example, human antibodies may be prepared by administering an immunogen to a transgenic animal that has been modified to produce intact human antibodies or intact antibodies with human variable regions in response to antigenic challenge. Such animals typically contain all or a portion of the human immunoglobulin loci, which replace the endogenous immunoglobulin loci, or are present extrachromosomally or integrated randomly into the animal's chromosomes. In such transgenic animals, e.g., mice, the endogenous immunoglobulin loci have generally been inactivated. Human variable regions from intact antibodies generated by such animals may be further modified, e.g., by combining with a different human constant region. Human antibodies can also be made by hybridoma-based methods known in the art, e.g., using known human myeloma and mouse-human heteromyeloma cell lines for the production of human monoclonal antibodies. Human antibodies may also be generated by isolating Fv clone variable domain sequences selected from human-derived phage display libraries. Such variable domain sequences may then be combined with a desired human constant domain. Techniques for selecting human antibodies from antibody libraries are known in the art and described herein.

[0353] Antibodies of the disclosure may be isolated by screening combinatorial libraries for antibodies with the desired activity or activities. For example, a variety of methods are known in the art for generating phage display libraries and screening such libraries for antibodies possessing the desired binding characteristics. In certain phage display methods, repertoires of VH and VL genes are separately cloned by polymerase chain reaction (PCR) and recombined randomly in phage libraries, which can then be screened for antigen-binding phage. Phage typically display antibody fragments, either as single-chain Fv (scFv) fragments or as Fab fragments. Libraries from immunized sources provide high-affinity antibodies to the immunogen without the requirement of constructing hybridomas. Alternatively, a naive antibody repertoire can be cloned (e.g., from human) to provide a single source of antibodies to a wide range of non-self and also self antigens without any immunization. Naive libraries can also be made synthetically by cloning un-rearranged V-gene segments from stem cells, and using PCR primers containing random sequences to amplify the highly variable CDR3 regions and to accomplish rearrangement in vitro. Antibodies or antibody fragments isolated from human antibody libraries are considered human antibodies or human antibody fragments herein.

[0354] In certain embodiments, an antibody provided herein is a multispecific antibody, e.g., a bispecific antibody. Multispecific antibodies are monoclonal antibodies that have binding specificities for at least two different sites or at least two different antigens. For example, one of the binding specificities can be to an ALK fusion polypeptide of the disclosure, and the other can be to any other antigen. Multispecific antibodies can be prepared as full length antibodies or as antibody fragments. Techniques for making multispecific antibodies are known in the art and include, but are not limited to, recombinant co-expression of two immunoglobulin heavy chain-light chain pairs having different specificities, and “knob-in-hole” engineering. Multispecific antibodies may also be made by engineering electrostatic steering effects (e.g., by introducing mutations in the constant region) for making heterodimeric Fes; cross-linking two or more antibodies or fragments; using leucine zippers to produce bispecific antibodies; using “diabody” technology for making bispecific antibody fragments; using single-chain Fv (scFv) dimers; and preparing trispecific antibodies. Engineered antibodies with three or more functional antigen binding sites, including “Octopus antibodies,” are also included in the disclosure. Antibodies or antibody fragments of the disclosure also include “Dual Acting FAbs” or “DAF,” e.g., comprising an antigen binding site that binds to an ALK fusion polypeptide of the disclosure as well as another, different antigen.

[0355] In certain embodiments, amino acid sequence variants of the antibodies provided herein are contemplated. For example, it may be desirable to improve the binding affinity and/or other biological properties of the antibody. Amino acid sequence variants of an antibody of the disclosure may be prepared by introducing appropriate modifications into the nucleotide sequence encoding the antibody, or by peptide synthesis. Such modifications include, for example, deletions, and/or insertions, and/or substitutions of residues within the amino acid sequences of the antibody. Any combination of deletions, insertions, and substitutions can be made to arrive at the final antibody, provided that the final antibody possesses the desired characteristics, e.g., antigen-binding.

[0356] In certain embodiments, antibody variants having one or more amino acid substitutions are provided. Sites of interest for substitutional mutagenesis include the HVRs and FRs. Amino acid substitutions may be introduced into an antibody of interest, and the products may be screened for a desired activity, e.g., retained/improved antigen binding, decreased immunogenicity, or improved or reduced antibody-dependent cell-mediated cytotoxicity (ADCC) and/or complement-dependent cytotoxicity (CDC).

[0357] In certain embodiments, an antibody of the present disclosure is altered to increase or to decrease the extent to which the antibody is glycosylated. Addition or deletion of glycosylation sites to an antibody may be conveniently accomplished by altering the amino acid sequence of the antibody, such that one or more glycosylation sites is created or removed. Antibody variants having bisected oligosaccharides are further provided, e.g., in which a biantennary oligosaccharide attached to the Fc region of the antibody is bisected by GlcNAc. In some embodiments, antibody variants of the disclosure may have increased fucosylation. In some embodiments, antibody variants of the disclosure may have reduced fucosylation. In some embodiments, antibody variants of the disclosure may have improved ADCC function. In some embodiments, antibody variants of the disclosure may have decreased ADCC function. Antibody variants with at least one galactose residue in the oligosaccharide attached to the Fc region are also provided. Such antibody variants may have improved CDC function. In some embodiments, antibody variants of the disclosure may have increased CDC function. In some embodiments, antibody variants of the disclosure may have decreased CDC function.

[0358] In certain embodiments, one or more amino acid modifications may be introduced into the Fc region of an antibody of the present disclosure, thereby generating an Fc region variant. The Fc region variant may comprise a human Fc region sequence (e.g., a human IgG1, IgG2, IgG3 or IgG4 Fc region) comprising an amino acid modification (e.g. a substitution) at one or more amino acid positions.

[0359] In certain embodiments, the present disclosure contemplates an antibody variant that possesses some but not all effector functions, which make it a desirable candidate for applications in which the half-life of the antibody in vivo is important, yet certain effector functions (such as CDC and ADCC) are unnecessary or deleterious. In vitro and/or in vivo cytotoxicity assays can be conducted to confirm the reduction/depletion of CDC and/or ADCC activities. For example, Fc receptor (FcR) binding assays can be conducted to ensure that the antibody lacks Fc-gamma-R binding (hence likely lacking ADCC activity), but retains FcRn binding ability. The primary cells that mediate ADCC, e.g., NK cells, express Fc-gamma-RIII only, whereas monocytes express Fc-gamma-RI, Fc-gamma-RII and Fc-gamma-RIII. Antibodies with reduced effector function include those with substitution of one or more of Fc region residues 238, 265, 269, 270, 297, 327 and 329. Such Fc mutants include Fc mutants with substitutions at two or more of amino acid positions 265, 269, 270, 297 and 327, including the so-called “DANA” Fc mutant with substitutions of residues 265 and 297 to alanine. Antibody variants with improved or diminished binding to FcRs are also included in the disclosure. In certain embodiments, an antibody variant comprises an Fc region with one or more amino acid substitutions that improve ADCC, e.g., substitutions at positions 298, 333, and/or 334 of the Fc region. In some embodiments, numbering of Fc region residues is according to EU numbering of residues. In some embodiments, alterations are made in the Fc region that result in altered (i.e., either improved or diminished) C1q binding and/or CDC. In some embodiments, antibodies of the disclosure include antibodies with increased half-lives and improved binding to the neonatal Fc receptor (FcRn), e.g., comprising one or more substitutions that improve binding of the Fc region to FcRn. Such Fc variants include those with substitutions at one or more of Fc region residues: 238, 256, 265, 272, 286, 303, 305, 307, 311, 312, 317, 340, 356, 360, 362, 376, 378, 380, 382, 413, 424 or 434, e.g., substitution of Fc region residue 434. See, also, Duncan & Winter, Nature 322:738-40 (1988); U.S. Pat. Nos. 5,648,260; 5,624,821; and WO 94/29351 for other examples of Fc region variants.

[0360] In certain embodiments, an antibody provided herein is a cysteine-engineered antibody, e.g., “thioMAb,” in which one or more residues of the antibody are substituted with cysteine residues. In some embodiments, the substituted residues occur at accessible sites of the antibody. By substituting those residues with cysteine, reactive thiol groups are thereby positioned at accessible sites of the antibody, and may be used to conjugate the antibody to other moieties, such as drug moieties or linker-drug moieties, e.g., to create an immunoconjugate, as described further herein. In certain embodiments, any one or more of the following residues may be substituted with cysteine: V205 (Kabat numbering) of the light chain; A118 (EU numbering) of the heavy chain; and S400 (EU numbering) of the heavy chain Fc region. Cysteine-engineered antibodies may be generated using any suitable method known in the art.

[0361] In some embodiments, an antibody or antibody fragment provided herein comprises a label or a tag. In some embodiments, the label or tag is a radiolabel, a fluorescent label, an enzymatic label, a sequence tag, biotin, or other ligands. Examples of labels or tags include, but are not limited to, 6×His-tag, biotin-tag, Glutathione-S-transferase (GST)-tag, green fluorescent protein (GFP)-tag, c-myc-tag, FLAG-tag, Thioredoxin-tag, Glu-tag, Nus-tag, V5-tag, calmodulin-binding protein (CBP)-tag, Maltose binding protein (MBP)-tag, Chitin-tag, alkaline phosphatase (AP)-tag, HRP-tag, Biotin Caboxyl Carrier Protein (BCCP)-tag, Calmodulin-tag, S-tag, Strep-tag, haemoglutinin (HA)-tag, digoxigenin (DIG)-tag, DsRed, RFP, Luciferase, Short Tetracysteine Tags, Halo-tag, and Nus-tag. In some embodiments, the label or tag comprises a detection agent, such as a fluorescent molecule or an affinity reagent or tag.

[0362] In some embodiments, an antibody or antibody fragment provided herein is conjugated to a drug molecule, e.g., an anti-cancer agent described herein, or a cytotoxic agent such as mertansine or monomethyl auristatin E (MMAE).

[0363] In certain embodiments, an antibody or antibody fragment provided herein may be further modified to contain additional nonproteinaceous moieties. Such moieties may be suitable for derivatization of the antibody, e.g., including but not limited to water soluble polymers. Non-limiting examples of water soluble polymers include, but are not limited to, polyethylene glycol (PEG), copolymers of ethylene glycol/propylene glycol, carboxymethylcellulose, dextran, polyvinyl alcohol, polyvinyl pyrrolidone, poly-1, 3-dioxolane, poly-1,3,6-trioxane, ethylene/maleic anhydride copolymer, polyamino acids (either homopolymers or random copolymers), and dextran or poly(n-vinyl pyrrolidone)polyethylene glycol, propropylene glycol homopolymers, prolypropylene oxide/ethylene oxide co-polymers, polyoxyethylated polyols (e.g., glycerol), polyvinyl alcohol, polyethylene glycol propionaldehyde, and mixtures thereof. The polymers may be of any molecular weight, and may be branched or unbranched. The number of polymers attached to the antibody may vary, and if more than one polymer is attached, the polymers can be the same or different molecules. In general, the number and/or type of polymers used for derivatization can be determined based on considerations including, but not limited to, the particular properties or functions of the antibody to be improved, or whether the antibody derivative will be used in a therapy under defined conditions. In some embodiments, provided herein are antibodies conjugated to carbon nanotubes, e.g., for use in methods to selectively heat the antibody using radiation to a temperature at which cells proximal to the antibody are killed.

### (iv) Samples

[0364] A variety of materials can be the source of, or serve as, samples for use in any of the methods of the disclosure, such as the methods for detection of an ALK fusion nucleic acid molecule or polypeptide of the disclosure, or fragments thereof.

[0365] For example, the sample can be, or be derived from: solid tissue such as from a fresh, frozen and/or preserved organ, tissue sample, biopsy (e.g., tumor, tissue or liquid biopsy), resection, smear, or aspirate; scrapings; bone marrow or bone marrow specimens; a bone marrow aspirate; blood or any blood constituents; blood cells; bodily fluids such as cerebrospinal fluid, amniotic fluid, urine, saliva, sputum, peritoneal fluid or interstitial fluid; pleural fluid; ascites; tissue or fine needle biopsy samples; surgical specimens; cell-containing body fluids; free-floating nucleic acids; feces; lymph; gynecological fluids; skin swabs; vaginal swabs; oral swabs; nasal swabs; washings or lavages such as ductal lavages or bronchoalveolar lavages; cells from any time in gestation or development of an individual; cells from a cancer or tumor; other body fluids, secretions, and/or excretions, and/or cells therefrom. In some embodiments, a sample is or comprises cells obtained from an individual. In some embodiments, the sample is or is derived from blood or blood constituents, e.g., obtained from a liquid biopsy. In some embodiments, the sample is or is derived from a tumor sample. In some embodiments, the sample is or comprises biological tissue or fluid. In some embodiments, the sample can contain compounds that are not naturally intermixed with the source of the sample in nature, such as preservatives, anticoagulants, buffers, fixatives, nutrients, antibiotics or the like. In some embodiments, the sample is preserved as a frozen sample or as a formaldehyde- or paraformaldehyde-fixed paraffin-embedded (FFPE) tissue preparation. In some embodiments, the sample comprises circulating tumor cells (CTCs).

[0366] In one embodiment, the sample comprises one or more cells associated with a tumor, e.g., tumor cells or tumor-infiltrating lymphocytes (TIL). In one embodiment, the sample includes one or more premalignant or malignant cells. In one embodiment, the sample is acquired from a hematologic malignancy (or pre-malignancy), e.g., a hematologic malignancy (or pre-malignancy) described herein. In one embodiment, the sample is acquired from a cancer, such as a cancer described herein. In some embodiments, the sample is acquired from a solid tumor, a soft tissue tumor or a metastatic lesion. In other embodiments, the sample includes tissue or cells from a surgical margin. In one embodiment, the sample is or is acquired from a liquid biopsy of blood, plasma, cerebrospinal fluid, sputum, stool, urine, or saliva. In some embodiments, the sample includes cell-free DNA (cfDNA) and/or circulating tumor DNA (ctDNA), e.g., from a biopsy of blood, plasma, cerebrospinal fluid, sputum, stool, urine, or saliva. In another embodiment, the sample includes one or more circulating tumor cells (CTCs) (e.g., a CTC acquired from a blood sample). In one embodiment, the sample is a cell not associated with a tumor or cancer, e.g., a non-tumor or non-cancer cell or a peripheral blood lymphocyte.

[0367] In some embodiments, a sample is a primary sample obtained directly from a source of interest by any appropriate means. For example, in some embodiments, a primary biological sample is obtained by a method chosen from biopsy (e.g., fine needle aspiration or tissue biopsy), surgery, or collection of body fluid (e.g., blood, lymph, or feces). In some embodiments, as will be clear from context, the term “sample” refers to a preparation that is obtained by processing (e.g., by removing one or more components of and/or by adding one or more agents to) a primary sample. Such a processed sample may comprise, for example, nucleic acids (e.g., for use in any of the methods for detection of ALK fusion nucleic acid molecules provided herein) or proteins (e.g., for use in any of the methods for detection of ALK fusion polypeptides provided herein) extracted from a sample or obtained by subjecting a primary sample to techniques such as amplification methods, reverse transcription of mRNA, or isolation and/or purification of certain components such as nucleic acids and/or proteins.

[0368] In some embodiments, the sample comprises nucleic acids, e.g., genomic DNA, cDNA, or mRNA. In some embodiments, the sample comprises cell-free DNA (cfDNA). In some embodiments, the sample comprises cell-free RNA (cfRNA). In some embodiments, the sample comprises circulating tumor DNA (ctDNA). In certain embodiments, the nucleic acids are purified or isolated (e.g., removed from their natural state). In some embodiments, the sample comprises tumor or cancer nucleic acids, such as nucleic acids from a tumor or cancer sample, e.g., genomic DNA, RNA, or cDNA derived from RNA, or from a liquid biopsy, e.g., ctDNA from blood, plasma, cerebrospinal fluid, sputum, stool, urine, or saliva. In certain embodiments, a tumor or cancer nucleic acid sample, or a ctDNA sample, is purified or isolated (e.g., it is removed from its natural state).

[0369] In some embodiments, the sample comprises tumor or cancer proteins or polypeptides, such as proteins or polypeptides from a tumor or a cancer sample, or from a liquid biopsy, e.g., from blood, plasma, cerebrospinal fluid, sputum, stool, urine, or saliva. In certain embodiments, the proteins or polypeptides are purified or isolated (e.g., removed from their natural state).

[0370] In some embodiments, the sample is obtained from an individual having a cancer, such as a cancer described herein. In some embodiments, the sample comprises an ALK fusion nucleic acid molecule or polypeptide of the disclosure.

[0371] In some embodiments, the sample is a control sample or a reference sample, e.g., not containing an ALK fusion nucleic acid molecule or polypeptide described herein. In certain embodiments, the reference sample is purified or isolated (e.g., it is removed from its natural state). In certain embodiments, the reference or control sample comprises a wild type or a non-mutated nucleic acid molecule or polypeptide counterpart to any of the ALK fusion nucleic acid molecules or polypeptides described herein. In other embodiments, the reference sample is from a non-tumor or cancer sample, e.g., a blood control, a normal adjacent tumor (NAT), or any other non-cancerous sample from the same or a different individual.

[0372] In some embodiments, an ALK fusion nucleic acid molecule of the disclosure is detected in a sample comprising genomic or subgenomic DNA fragments, or RNA (e.g., mRNA), isolated from a sample, e.g., a tumor or cancer sample, a normal adjacent tissue (NAT) sample, a tissue sample, or a blood, plasma, cerebrospinal fluid, sputum, stool, urine, or saliva sample obtained from an individual.

[0373] In some embodiments, the sample comprises cDNA derived from an mRNA sample or from a sample comprising mRNA. In some embodiments, an ALK fusion nucleic acid molecule of the disclosure is detected in a sample comprising cell-free DNA (cfDNA), cell-free RNA, and/or circulating tumor DNA (ctDNA). In some embodiments, an ALK fusion nucleic acid molecule of the disclosure is detected in a sample comprising cell-free DNA (cfDNA) and/or circulating tumor DNA (ctDNA). In some embodiments, an ALK fusion nucleic acid molecule of the disclosure is detected in a sample comprising circulating tumor DNA (ctDNA).

### C. Anti-Cancer Therapies

[0374] Certain aspects of the present disclosure relate to anti-cancer therapies, as well as methods for identifying an individual having a cancer who may benefit from a treatment comprising an anti-cancer therapy; selecting a treatment for an individual having a cancer; identifying one or more treatment options for an individual having a cancer; predicting survival of an individual having a cancer; treating or delaying progression of cancer; monitoring, evaluating or screening an individual having a cancer; detecting the presence or absence of a cancer in an individual; monitoring progression or recurrence of a cancer in an individual; or identifying a candidate treatment for a cancer in an individual in need thereof. The present disclosure also provides uses for anti-cancer therapies (e.g., in methods of treating or delaying progression of cancer in an individual, or in methods for manufacturing a medicament for treating or delaying progression of cancer). In some instances, the methods of the disclosure can include administering an anti-cancer therapy or applying an anti-cancer therapy to an individual based on a generated genomic and/or sequencing mutation profile. An anti-cancer therapy can refer to a compound that is effective in the treatment of cancer cells. Examples of anti-cancer agents or anti-cancer therapies include, but not limited to, alkylating agents, antimetabolites, natural products, hormones, chemotherapy, radiation therapy, immunotherapy, surgery, or a therapy configured to target a defect in a specific cell signaling pathway, e.g., a defect in a DNA mismatch repair (MMR) pathway.

[0375] In some embodiments, an anti-cancer therapy of the disclosure is a small molecule inhibitor, an antibody, a cellular therapy, a nucleic acid, a virus-based therapy, an antibody-drug conjugate, a recombinant protein, a fusion protein, a natural compound, a peptide, a PROteolysis-TArgeting Chimera (PROTAC), a treatment for cancer comprising an ALK fusion nucleic acid molecule or polypeptide of the disclosure, a treatment for cancer being tested in a clinical trial, a targeted therapy, a treatment being tested in a clinical trial for cancer comprising an ALK fusion nucleic acid molecule or polypeptide of the disclosure, or any combination thereof, e.g., a described in further detail below. In some embodiments, the anti-cancer therapy is an ALK-targeted therapy. In some embodiments, the anti-cancer therapy is a kinase inhibitor, such as a kinase inhibitor described herein or known in the art. In some embodiments, the kinase inhibitor is a multi-kinase inhibitor or an ALK-specific inhibitor known in the art or described herein. In some embodiments, the nucleic acid inhibits the expression of an ALK fusion nucleic acid molecule or polypeptide of the disclosure.

[0376] In some embodiments, an anti-cancer therapy of the disclosure is an ALK-targeted therapy, e.g., as described herein or known in the art. In some embodiments, the ALK-targeted therapy is a small molecule inhibitor, an antibody, a cellular therapy, a nucleic acid, a virus-based therapy, an antibody-drug conjugate, a recombinant protein, a fusion protein, a natural compound, a peptide, a PROteolysis-TArgeting Chimera (PROTAC), a treatment for ALK-positive or ALK-rearranged cancer, an ALK-targeted therapy being tested in a clinical trial, a treatment for ALK-positive or ALK-rearranged cancer being tested in a clinical trial, or any combination thereof. In some embodiments, the ALK-targeted therapy is a kinase inhibitor known in the art or described herein. In some embodiments, the ALK-targeted therapy is a tyrosine kinase inhibitor known in the art or described herein. In some embodiments, the ALK-targeted therapy is a multi-kinase inhibitor or an ALK-specific inhibitor known in the art or described herein. In some embodiments, the kinase inhibitor inhibits the kinase activity of an ALK polypeptide. In some embodiments, the ALK-targeted therapy comprises one or more of crizotinib, alectinib (AF802, CH5424802), ceritinib, lorlatinib, brigatinib, ensartinib (X-396), repotrectinib (TPX-005), entrectinib (RXDX-101), AZD3463, CEP-37440, belizatinib (TSR-011), ASP3026, KRCA-0008, TQ-B3139, TPX-0131, TAE684 (NVP-TAE684), CT-707, WX-0593, alkotinib, SIM1803-1A, PLB1003, SAF-189s, PF03446962, TQ-B3101, APG-2449, X-376, CEP-28122, and GSK1838705A. In some embodiments, the nucleic acid inhibits the expression of an ALK fusion nucleic acid molecule or polypeptide of the disclosure. In some embodiments, the ALK-targeted therapy is an ALK kinase inhibitor, e.g., as described in examples 3-39 of WO2005016894, which is incorporated herein by reference.

[0377] In some embodiments, the ALK-targeted therapy comprises alectinib. In a Phase 3 study comparing alectinib with crizotinib in ALK-rearranged, inhibitor-naive NSCLC, patients treated with alectinib experienced significantly improved median PFS (34.8 vs. 10.9 months; HR=0.43), with PFS benefit observed in patients with EML4-ALK variants 1, 2, and 3a/b (Peters et al., The New England journal of medicine, vol. 377, 9 (2017): 829-838; Camidge et al., Journal of thoracic oncology, vol. 14, 7 (2019): 1233-1243). Similar results have been reported in the J-ALEX trial for inhibitor-naive Japanese patients with ALK-positive NSCLC (Hida et al., Lancet, vol. 390, 10089 (2017): 29-39; Nakagawa et al., Lung cancer, vol. 139 (2020): 195-199). For patients with crizotinib-refractory ALK-rearranged NSCLC, Phase 1/2 and Phase 2 trials of alectinib reported ORRs of 45% to 55% (Shaw et al., The Lancet. Oncology, vol. 17, 2 (2016): 234-242; Gadgeel et al., The Lancet. Oncology, vol. 15, 10 (2014): 1119-28; Ou et al., Journal of clinical oncology, vol. 34, 7 (2016): 661-8), and the Phase 3 ALUR trial showed that alectinib significantly improved PFS compared with chemotherapy (7.1 vs. 1.6 months; HR=0.32) (Novello et al., Annals of oncology, vol. 29, 6 (2018): 1409-1416). Alectinib combined with atezolizumab led to an ORR of 81% (17/21) as first-line treatment for PD-L1 unselected, ALK+NSCLC (Kim et al., Journal of Clinical Oncology 2018 36:15_suppl, 9009-9009). Accordingly, an individual having a cancer comprising any of the ALK fusion nucleic acid molecules or polypeptides provided herein may benefit from a treatment comprising alectinib.

[0378] In some embodiments, the ALK-targeted therapy comprises brigatinib. An initial Phase 1/2 study of brigatinib for the treatment of patients with ALK-rearranged NSCLC reported responses in 71.8% (51/71) of crizotinib-pretreated patients and in 100.0% (8/8) of crizotinib-naive patients with median PFSs of 13.2 months and unreached, respectively (Gettinger et al., The Lancet. Oncology, vol. 17, 12 (2016): 1683-1696). Interim analyses of the Phase 3 ALTA-1L study comparing brigatinib to crizotinib for front-line treatment of patients with ALK-positive NSCLC show a superior median PFS (24.0 vs. 11.0 months, HR=0.49) and a significantly higher intracranial ORR (78% vs. 30%) with brigatinib (Camidge et al., The New England journal of medicine, vol. 379, 21 (2018): 2027-2039; Camidge et al., Annals of Oncology (2019) 30 (suppl_9): ix183-ix202). The Phase 2 ALTA study demonstrated the activity of brigatinib with 2 different dosing regimens following progression on crizotinib for patients with ALK-positive NSCLC, reporting ORRs of 46% and 56%, median PFSs of 9.2 and 16.7 months, and median OSs of 29.5 and 34.1 months (Huber et al., Journal of thoracic oncology, vol. 15, 3 (2020): 404-415). A retrospective study reported an ORR of 16.7% (3/18), a DCR of 66.7% (12/18), and a median PFS of 4.4 months for patients with ALK-positive alectinib-refractory NSCLC treated with brigatinib (Lin et al., Journal of thoracic oncology, vol. 13, 10 (2018): 1530-1538). Accordingly, an individual having a cancer comprising any of the ALK fusion nucleic acid molecules or polypeptides provided herein may benefit from a treatment comprising brigatinib.

[0379] In some embodiments, the ALK-targeted therapy comprises ceritinib. A Phase 3 study of ceritinib for ALK inhibitor-naive patients with ALK-rearranged NSCLC observed a whole-body (WB) ORR of 63.7%, a WB DCR of 89.5%, and PFS of 11.1 months (Felip et al., Journal of Clinical Oncology 2015 33:15_suppl, 8060-8060). Following progression on prior chemotherapy and crizotinib, patients with ALK-rearranged NSCLC achieved a WB ORR of 38.6%, WB DCR of 77.1%, and PFS of 5.4 months on ceritinib (Mok et al., Journal of Clinical Oncology 2015 33:15_suppl, 8059-8059). A Phase 1 study of ceritinib reported a 58% response rate for 114 patients with ALK-rearranged NSCLC and a response rate of 56% for 80 of these patients who had previously been treated with crizotinib (Shaw et al., The New England journal of medicine, vol. 370, 13 (2014): 1189-97). A patient with colorectal carcinoma and a STRN-ALK fusion exhibited clinical benefit from ceritinib (Yakirevich et al., Clinical cancer research, vol. 22, 15 (2016): 3831-40). A patient with pancreatic ductal adenocarcinoma harboring an EML4-ALK fusion was reported to have a response lasting 2 months (Singhi et al., 2016; USCAP Abstract 1775). Accordingly, an individual having a cancer comprising any of the ALK fusion nucleic acid molecules or polypeptides provided herein may benefit from a treatment comprising ceritinib.

[0380] In some embodiments, the ALK-targeted therapy comprises crizotinib. Three Phase 3 studies for patients with ALK-positive NSCLC reported superior PFS (7.7-11.1 vs. 3.0-7.0 months) and ORR (65.0%-87.5% vs. 20.0%-45.6%) when treated with crizotinib compared with chemotherapy regimens in various settings (Lu et al., Journal of Clinical Oncology 2016 34:15_suppl, 9058-9058; Shaw et al., Journal of Clinical Oncology 2016 34:15_suppl, 9066-9066; Solomon et al., The New England journal of medicine, vol. 371, 23 (2014): 2167-77). A pooled retrospective analysis of patients with ALK-rearranged NSCLC and concurrent brain metastases from the PROFILE 1007 and 1005 studies reported 12-week intracranial DCRs of 56% versus 62% and intracranial ORRs of 18% versus 33% for patients with previously untreated versus previously treated brain metastases (Costa et al., Journal of clinical oncology, vol. 33, 17 (2015): 1881-8). In a retrospective study of 90 patients with brain metastases from ALK-rearranged NSCLC, the median OS after diagnosis of brain metastasis was 49.5 months; lack of prior targeted therapy, absence of extracranial metastasis, and a Karnofsky performance score of 90 or higher were significantly associated with improved OS (Johung et al., Journal of clinical oncology, vol. 34, 2 (2016): 123-9). Upon disease progression, further survival benefit has been observed for patients with ALK-positive NSCLC who continue crizotinib treatment (Ou et al., Annals of oncology, vol. 25, 2 (2014): 415-22). Accordingly, an individual having a cancer comprising any of the ALK fusion nucleic acid molecules or polypeptides provided herein may benefit from a treatment comprising crizotinib.

[0381] In some embodiments, the ALK-targeted therapy comprises entrectinib. Phase 1 trials have reported a combined 66.7% ORR (1 CR, 5 PRs; n=9) for patients with ALK-rearranged solid tumors treated with entrectinib; responses were observed for patients with NSCLC (2/4), renal cell carcinoma (1/1), colorectal cancer ([CRC], 1/1), and inflammatory myofibroblastic tumors (2/2) (Drilon et al., Cancer discovery vol. 7, 4 (2017): 400-409; Desai et al., Journal of Clinical Oncology 2020 38:15_suppl, 107-107). Accordingly, an individual having a cancer comprising any of the ALK fusion nucleic acid molecules or polypeptides provided herein may benefit from a treatment comprising entrectinib.

[0382] In some embodiments, the ALK-targeted therapy comprises lorlatinib. In the Phase 3 CROWN study for the first-line treatment of ALK-positive non-small cell lung cancer (NSCLC), lorlatinib was shown to be superior to crizotinib, with significantly improved median PFS (mPFS; not estimable vs. 9.3 months, HR=0.28) and higher overall ORR (76% vs. 58%) and intracranial ORR (82.4% [14/17] vs. 23.1% [3/13]) (Shaw et al., The New England journal of medicine, vol. 383, 21 (2020): 2018-2029). In a pivotal Phase 2 study for patients with ALK-positive NSCLC who had progressed on 1 or more ALK TKIs, lorlatinib elicited a 47% ORR, a 63.0% (51/81) intracranial ORR, and an mPFS of 7.3 months (Solomon et al., The Lancet. Oncology, vol. 19, 12 (2018): 1654-1667); the ORR was 40% for patients previously treated with 1 or more second-generation TKIs (Bauer et al., 2020; AACR Abstract CT025). For patients whose tumors harbored 1 or more ALK kinase domain mutations, lorlatinib led to responses for 64.4% (29/45), including 57.1% (16/28) of those with the ALK G1202R resistance mutation (Shaw et al., Journal of clinical oncology, vol. 37, 16 (2019): 1370-1379); G1202, therefore, does not appear to represent a major mechanism of lorlatinib resistance (Yoda et al., Cancer discovery, vol. 8, 6 (2018): 714-729; Dagogo-Jack, Ibiayi et al., JCO precision oncology, vol. 2018 (2018): PO.17.00160; Ou et al., Lung cancer, vol. 106 (2017): 110-114). In an expansion cohort of a Phase 1/2 study, patients with ALK-positive NSCLC who remained on lorlatinib following progression exhibited improved median OS and median OS post-PD relative to patients who received another treatment or no subsequent treatment (Ou et al., 2020; ESMO Abstract 1302P). In the JAVELIN Lung 101 study, the combination of lorlatinib and avelumab led to an ORR of 46.4% (13/28) for patients with previously treated ALK-positive NSCLC (Shaw et al., Journal of Clinical Oncology 2018 36:15_suppl, 9008-9008). In the fourth-line setting, lorlatinib led to disappearance of leptomeningeal disease for a patient with ALK-rearranged metastatic inflammatory myofibroblastic sarcoma (Yuan et al., The American journal of case reports, vol. 18 799-804. 17 Jul. 2017; Parker et al., Journal of oncology pharmacy practice, vol. 25, 5 (2019): 1226-1230). Accordingly, an individual having a cancer comprising any of the ALK fusion nucleic acid molecules or polypeptides provided herein may benefit from a treatment comprising lorlatinib.

[0383] In some embodiments, an anti-cancer therapy of the disclosure (e.g., an ALK-targeted therapy) is administered in combination with an additional anti-cancer therapy. In some embodiments, the additional anti-cancer therapy is any anti-cancer therapy known in the art or described herein. In some embodiments, the additional anti-cancer therapy comprises one or more of a small molecule inhibitor, a chemotherapeutic agent, a cancer immunotherapy, an antibody, a cellular therapy, a nucleic acid, a surgery, a radiotherapy, an anti-angiogenic therapy, an anti-DNA repair therapy, an anti-inflammatory therapy, an anti-neoplastic agent, a growth inhibitory agent, a cytotoxic agent, a vaccine, a small molecule agonist, a virus-based therapy, an antibody-drug conjugate, a recombinant protein, a fusion protein, a natural compound, a peptide, a PROteolysis-TArgeting Chimera (PROTAC), or any combination thereof.

[0384] In some embodiments, an anti-cancer therapy of the disclosure comprises a cyclin-dependent kinase (CDK) inhibitor, e.g., alone or in combination with an ALK-targeted therapy. In some embodiments, the CDK inhibitor inhibits CDK4. In some embodiments, the CDK inhibitor inhibits Cyclin D/CDK4. In some embodiments, the CDK inhibitor is (a) a small molecule that inhibits one or more enzymatic activities of CDK4, (b) an antibody that inhibits one or more activities of CDK4 (e.g., by binding to and inhibiting one or more activities of CDK4, binding to and inhibiting expression of CDK4, and/or binding to and inhibiting one or more activities of a cell expressing CDK4, such as by inducing antibody-dependent cellular cytotoxicity, ADCC, or phagocytosis, ADCP), or (c) a nucleic acid that inhibits expression of CDK4 (e.g., an antisense oligonucleotide, miRNA, siRNA, morpholino, CRISPR-based therapeutic, and the like). In some embodiments, the CDK inhibitor inhibits CDK4 and CDK6. In some embodiments, the CDK inhibitor is a small molecule inhibitor of CDK4 (e.g., a competitive or non-competitive inhibitor). Non-limiting examples of CDK inhibitors include palbociclib, ribociclib, and abemaciclib, as well as pharmaceutically acceptable salts thereof.

[0385] In some embodiments, an anti-cancer therapy of the disclosure comprises a murine double minute 2 homolog (MDM2) inhibitor, e.g., alone or in combination with an ALK-targeted therapy. In some embodiments, the MDM2 inhibitor is (a) a small molecule that inhibits one or more activities of MDM2 (e.g., binding to p53), (b) an antibody that inhibits one or more activities of MDM2 (e.g., by binding to and inhibiting one or more activities of MDM2, binding to and inhibiting expression of MDM2, and/or binding to and inhibiting one or more activities of a cell expressing MDM2, such as by inducing antibody-dependent cellular cytotoxicity, ADCC, or phagocytosis, ADCP), or (c) a nucleic acid that inhibits expression of MDM2 (e.g., an antisense oligonucleotide, miRNA, siRNA, morpholino, CRISPR-based therapeutic, and the like). In some embodiments, the MDM2 inhibitor is a small molecule inhibitor of MDM2 (e.g., a competitive or non-competitive inhibitor). Non-limiting examples of MDM2 inhibitors include nutlin-3a, RG7112, idasanutlin (RG7388), AMG-232, MI-63, MI-291, MI-391, MI-77301 (SAR405838), APG-115, DS-3032b, NVP-CGMO97, and HDM-201 (siremadlin), as well as pharmaceutically acceptable salts thereof. In some embodiments, the MDM2 inhibitor inhibits or disrupts interaction between MDM2 and p53.

[0386] In some embodiments, an anti-cancer therapy of the disclosure comprises (alone or in combination with an ALK-targeted therapy) one or more of an antimetabolite, DNA-damaging agent, or platinum-containing therapeutic (e.g., 5-azacitadine, 5-fluorouracil, acadesine, busulfan, carboplatin, cisplatin, chlorambucil, CPT-11, cytarabine, daunorubicin, decitabine, doxorubicin, etoposide, fludarabine, gemcitabine, idarubicin, radiation, oxaliplatin, temozolomide, topotecan, trabectedin, GSK2830371, or rucaparib); a pro-apoptotic agent (e.g., a BCL2 inhibitor or downregulator, SMAC mimetic, or TRAIL agonist such as ABT-263, ABT-737, oridonin, venetoclax, combination of venetoclax and an anti-CD20 antibody such as obinutuzumab or rituximab, 1396-11, ABT-10, SM-164, D269H/E195R, or rhTRAIL); a tyrosine kinase inhibitor (e.g., as described herein); an inhibitor of RAS, RAF, MEK, or the MAPK pathway (e.g., AZD6244, dabrafenib, LGX818, PD0325901, pimasertib, trametinib, or vemurafenib); an inhibitor of PI3K, mTOR, or Akt (e.g., as described herein); a CDK inhibitor (e.g., as described herein); a PKC inhibitor (e.g., LXS196 or sotrastaurin); an antibody-based therapeutic (e.g., an anti-PD-1 or anti-PDL1 antibody such as atezolizumab, pembrolizumab, nivolumab, or spartalizumab; an anti-CD20 antibody such as obinutuzumab or rituximab; or an anti-DR5 antibody such as drozitumab); a proteasome inhibitor (e.g., bortezomib, carfilzomib, ixazomib, or MG-132); an HDAC inhibitor (e.g., SAHA or VPA); an antibiotic (e.g., actinomycin D); a zinc-containing therapeutic (e.g., zinc or ZMC1); an HSP inhibitor (e.g., geldanamycin); an ATPase inhibitor (e.g., archazolid); a mitotic inhibitor (e.g., paclitaxel or vincristine); metformin; methotrexate; tanshinone IIA; and/or P5091.

[0387] In some embodiments, an anti-cancer therapy of the disclosure comprises a tyrosine kinase inhibitor, e.g., alone or in combination with an ALK-targeted therapy. In some embodiments, the tyrosine kinase inhibitor is an ALK-targeted anti-cancer therapy or treatment. In some embodiments, the tyrosine kinase inhibitor is (a) a small molecule that inhibits one or more enzymatic activities of a tyrosine kinase, (b) an antibody that inhibits one or more activities of a tyrosine kinase (e.g., by binding to and inhibiting one or more activities of the tyrosine kinase, binding to and inhibiting expression, such as cell surface expression, of the tyrosine kinase, and/or binding to and inhibiting one or more activities of a cell expressing the tyrosine kinase, such as by inducing antibody-dependent cellular cytotoxicity, ADCC, or phagocytosis, ADCP), or (c) a nucleic acid that inhibits expression of a tyrosine kinase (e.g., an antisense oligonucleotide, miRNA, siRNA, morpholino, CRISPR-based therapeutic, and the like). In some embodiments, the tyrosine kinase inhibitor is a small molecule inhibitor of a tyrosine kinase (e.g., a competitive or non-competitive inhibitor). Non-limiting examples of tyrosine kinase inhibitors include imatinib, crenolanib, linifanib, ninetedanib, axitinib, dasatinib, imetelstat, midostaurin, pazopanib, sorafenib, sunitinb, motesanib, masitinib, vatalanib, cabozanitinib, tivozanib, OSI-930, Ki8751, telatinib, dovitinib, tyrphostin AG 1296, and amuvatinib, as well as pharmaceutically acceptable salts thereof.

[0388] In some embodiments, an anti-cancer therapy of the disclosure comprises a mitogen-activated protein kinase (MEK) inhibitor, e.g., alone or in combination with an ALK-targeted therapy. In some embodiments, the MEK inhibitor inhibits one or more activities of MEK1 and/or MEK2. In some embodiments, the anti-cancer therapy/MEK inhibitor is (a) a small molecule that inhibits one or more enzymatic activities of MEK, (b) an antibody that inhibits one or more activities of MEK (e.g., by binding to and inhibiting one or more activities of MEK, binding to and inhibiting expression of MEK, and/or binding to and inhibiting one or more activities of a cell expressing MEK, such as by inducing antibody-dependent cellular cytotoxicity, ADCC, or phagocytosis, ADCP), or (c) a nucleic acid that inhibits expression of MEK (e.g., an antisense oligonucleotide, miRNA, siRNA, morpholino, CRISPR-based therapeutic, and the like). In some embodiments, the MEK inhibitor is a small molecule inhibitor of MEK (e.g., a competitive or non-competitive inhibitor). Non-limiting examples of MEK inhibitors include trametinib, cobimetinib, binimetinib, CI-1040, PD0325901, selumetinib, AZD8330, TAK-733, GDC-0623, refametinib, pimasertib, R04987655, R05126766, WX-544, and HL-085, as well as pharmaceutically acceptable salts thereof. In some embodiments, the anti-cancer therapy inhibits one or more activities of the Raf/MEK/ERK pathway, including inhibitors of Raf, MEK, and/or ERK.

[0389] In some embodiments, an anti-cancer therapy of the disclosure comprises a mammalian target of rapamycin (mTOR) inhibitor, e.g., alone or in combination with an ALK-targeted therapy. In some embodiments, the mTOR inhibitor is (a) a small molecule that inhibits one or more enzymatic activities of mTOR, (b) an antibody that inhibits one or more activities of mTOR (e.g., by binding to and inhibiting one or more activities of mTOR, binding to and inhibiting expression of mTOR, and/or binding to and inhibiting one or more activities of a cell expressing mTOR, such as by inducing antibody-dependent cellular cytotoxicity, ADCC, or phagocytosis, ADCP), or (c) a nucleic acid that inhibits expression of mTOR (e.g., an antisense oligonucleotide, miRNA, siRNA, morpholino, CRISPR-based therapeutic, and the like). In some embodiments, the mTOR inhibitor is a small molecule inhibitor of mTOR (e.g., a competitive inhibitor, such as an ATP-competitive inhibitor, or a non-competitive inhibitor, such as a rapamycin analog). Non-limiting examples of mTOR inhibitors include temsirolimus, everolimus, ridaforolimus, dactolisib, GSK2126458, XL765, AZD8055, AZD2014, MLN128, PP242, NVP-BEZ235, LY3023414, PQR309, PKI587, and OSI027, as well as pharmaceutically acceptable salts thereof. In some embodiments, the anti-cancer therapy inhibits one or more activities of the Akt/mTOR pathway, including inhibitors of Akt and/or mTOR.

[0390] In some embodiments, an anti-cancer therapy of the disclosure comprises a PI3K inhibitor or Akt inhibitor, e.g., alone or in combination with an ALK-targeted therapy. In some embodiments, the PI3K inhibitor inhibits one or more activities of PI3K. In some embodiments, the anti-cancer therapy/PI3K inhibitor is (a) a small molecule that inhibits one or more enzymatic activities of PI3K, (b) an antibody that inhibits one or more activities of PI3K (e.g., by binding to and inhibiting one or more activities of PI3K, binding to and inhibiting expression of PI3K, and/or binding to and inhibiting one or more activities of a cell expressing PI3K, such as by inducing antibody-dependent cellular cytotoxicity, ADCC, or phagocytosis, ADCP), or (c) a nucleic acid that inhibits expression of PI3K (e.g., an antisense oligonucleotide, miRNA, siRNA, morpholino, CRISPR-based therapeutic, and the like). In some embodiments, the PI3K inhibitor is a small molecule inhibitor of PI3K (e.g., a competitive or non-competitive inhibitor). Non-limiting examples of PI3K inhibitors include GSK2636771, buparlisib (BKM120), AZD8186, copanlisib (BAY80-6946), LY294002, PX-866, TGX115, TGX126, BEZ235, SF1126, idelalisib (GS-1101, CAL-101), pictilisib (GDC-094), GDCO0032, IPI145, INK1117 (MLN1117), SAR260301, KIN-193 (AZD6482), duvelisib, GS-9820, GSK2636771, GDC-0980, AMG319, pazobanib, and alpelisib (BYL719, Piqray), as well as pharmaceutically acceptable salts thereof. In some embodiments, the AKT inhibitor inhibits one or more activities of AKT (e.g., AKT1). In some embodiments, the AKT inhibitor is (a) a small molecule that inhibits one or more enzymatic activities of AKT1, (b) an antibody that inhibits one or more activities of AKT1 (e.g., by binding to and inhibiting one or more activities of AKT1, binding to and inhibiting expression of AKT1, and/or binding to and inhibiting one or more activities of a cell expressing AKT1, such as by inducing antibody-dependent cellular cytotoxicity, ADCC, or phagocytosis, ADCP), or (c) a nucleic acid that inhibits expression of AKT1 (e.g., an antisense oligonucleotide, miRNA, siRNA, morpholino, CRISPR-based therapeutic, and the like). In some embodiments, the AKT1 inhibitor is a small molecule inhibitor of AKT1 (e.g., a competitive or non-competitive inhibitor). Non-limiting examples of AKT1 inhibitors include GSK690693, GSK2141795 (uprosertib), GSK2110183 (afuresertib), AZD5363, GDC-0068 (ipatasertib), AT7867, CCT128930, MK-2206, BAY 1125976, AKT1 and AKT2-IN-1, perifosine, and VIII, as well as pharmaceutically acceptable salts thereof. In some embodiments, the AKT1 inhibitor is a pan-Akt inhibitor.

[0391] In some embodiments, an anti-cancer therapy of the disclosure comprises a hedgehog (Hh) inhibitor, e.g., alone or in combination with an ALK-targeted therapy. In some embodiments, the Hh inhibitor is (a) a small molecule that inhibits one or more enzymatic activities of Hh, (b) an antibody that inhibits one or more activities of Hh (e.g., by binding to and inhibiting one or more activities of Hh, binding to and inhibiting expression of Hh, and/or binding to and inhibiting one or more activities of a cell expressing Hh, such as by inducing antibody-dependent cellular cytotoxicity, ADCC, or phagocytosis, ADCP), or (c) a nucleic acid that inhibits expression of Hh (e.g., an antisense oligonucleotide, miRNA, siRNA, morpholino, CRISPR-based therapeutic, and the like). In some embodiments, the Hh inhibitor is a small molecule inhibitor of Hh (e.g., a competitive or non-competitive inhibitor). Non-limiting examples of Hh inhibitors include sonidegib, vismodegib, erismodegib, saridegib, BMS833923, PF-04449913, and LY2940680, as well as pharmaceutically acceptable salts thereof.

[0392] In some embodiments, an anti-cancer therapy of the disclosure comprises a heat shock protein (HSP) inhibitor, a MYC inhibitor, an HDAC inhibitor, an immunotherapy, a neoantigen, a vaccine, or a cellular therapy, e.g., alone or in combination with an ALK-targeted therapy.

[0393] In some embodiments, the anti-cancer therapy comprises one or more of an immune checkpoint inhibitor, a chemotherapy, a VEGF inhibitor, an Integrin β3 inhibitor, a statin, an EGFR inhibitor, an mTOR inhibitor, a PI3K inhibitor, a MAPK inhibitor, or a CDK4/6 inhibitor, e.g., alone or in combination with an ALK-targeted therapy.

[0394] In some embodiments, the anti-cancer therapy comprises a kinase inhibitor, e.g., alone or in combination with an ALK-targeted therapy. In some embodiments, the kinase inhibitor is crizotinib, alectinib, ceritinib, lorlatinib, brigatinib, ensartinib (X-396), repotrectinib (TPX-005), entrectinib (RXDX-101), AZD3463, CEP-37440, belizatinib (TSR-011), ASP3026, KRCA-0008, TQ-B3139, TPX-0131, or TAE684 (NVP-TAE684). In some embodiments, the kinase inhibitor is an ALK kinase inhibitor, e.g., as described herein and/or in examples 3-39 of WO2005016894, which is incorporated herein by reference.

[0395] In some embodiments, the anti-cancer therapy comprises a heat shock protein (HSP) inhibitor, e.g., alone or in combination with an ALK-targeted therapy. In some embodiments, the HSP inhibitor is a Pan-HSP inhibitor, such as KNK423. In some embodiments, the HSP inhibitor is an HSP70 inhibitor, such as cmHsp70.1, quercetin, VER155008, or 17-AAD. In some embodiments, the HSP inhibitor is a HSP90 inhibitor. In some embodiments, the HSP90 inhibitor is 17-AAD, Debio0932, ganetespib (STA-9090), retaspimycin hydrochloride (retaspimycin, IPI-504), AUY922, alvespimycin (KOS-1022, 17-DMAG), tanespimycin (KOS-953, 17-AAG), DS 2248, or AT13387 (onalespib). In some embodiments, the HSP inhibitor is an HSP27 inhibitor, such as Apatorsen (OGX-427).

[0396] In some embodiments, the anti-cancer therapy comprises a MYC inhibitor, e.g., alone or in combination with an ALK-targeted therapy. In some embodiments, the MYC inhibitor is MYCi361 (NUCC-0196361), MYCi975 (NUCC-0200975), Omomyc (dominant negative peptide), ZINC16293153 (Min9), 10058-F4, JKY-2-169, 7594-0035, or inhibitors of MYC/MAX dimerization and/or MYC/MAX/DNA complex formation.

[0397] In some embodiments, the anti-cancer therapy comprises a histone deacetylase (HDAC) inhibitor, e.g., alone or in combination with an ALK-targeted therapy. In some embodiments, the HDAC inhibitor is belinostat (PXD101, e.g., Beleodaq®), SAHA (vorinostat, suberoylanilide hydroxamine, e.g., Zolinza®), panobinostat (LBH589, LAQ-824), ACY1215 (Rocilinostat), quisinostat (JNJ-26481585), abexinostat (PCI-24781), pracinostat (SB939), givinostat (ITF2357), resminostat (4SC-201), trichostatin A (TSA), MS-275 (etinostat), Romidepsin (depsipeptide, FK228), MGCD0103 (mocetinostat), BML-210, CAY10603, valproic acid, MC1568, CUDC-907, CI-994 (Tacedinaline), Pivanex (AN-9), AR-42, Chidamide (CS055, HBI-8000), CUDC-101, CHR-3996, MPTOE028, BRD8430, MRLB-223, apicidin, RGFP966, BG45, PCI-34051, C149 (NCC149), TMP269, Cpd2, T247, T326, LMK235, CIA, HPOB, Nexturastat A, Befexamac, CBHA, Phenylbutyrate, MC1568, SNDX275, Scriptaid, Merck60, PX089344, PX105684, PX117735, PX117792, PX117245, PX105844, compound 12 as described by Li et al., Cold Spring Harb Perspect Med (2016) 6(10):a026831, or PX117445.

[0398] In some embodiments, the anti-cancer therapy comprises a VEGF inhibitor, e.g., alone or in combination with an ALK-targeted therapy. In some embodiments, the VEGF inhibitor is Bevacizumab (e.g., Avastin®), BMS-690514, ramucirumab, pazopanib, sorafenib, sunitinib, golvatinib, vandetanib, cabozantinib, levantinib, axitinib, cediranib, tivozanib, lucitanib, semaxanib, nindentanib, regorafinib, or aflibercept.

[0399] In some embodiments, the anti-cancer therapy comprises an integrin 03 inhibitor, e.g., alone or in combination with an ALK-targeted therapy. In some embodiments, the integrin 03 inhibitor is anti-avb3 (clone LM609), cilengitide (EMD121974, NSC, 707544), an siRNA, GLPG0187, MK-0429, CNTO95, TN-161, etaracizumab (MEDI-522), intetumumab (CNTO95) (anti-alphaV subunit antibody), abituzumab (EMD 525797/DI17E6) (anti-alphaV subunit antibody), JSM6427, SJ749, BCH-15046, SCH221153, or SC56631. In some embodiments, the anti-cancer therapy comprises an αIIbβ3 integrin inhibitor, e.g., alone or in combination with an ALK-targeted therapy. In some embodiments, the αIIbβ3 integrin inhibitor is abciximab, eptifibatide (e.g., Integrilin®), or tirofiban (e.g., Aggrastat®).

[0400] In some embodiments, the anti-cancer therapy comprises an mTOR inhibitor, e.g., alone or in combination with an ALK-targeted therapy. In some embodiments, the mTOR inhibitor is temsirolimus (CCI-779), KU-006379, PP242, Torin1, Torin2, ICSN3250, Rapalink-1, CC-223, sirolimus (rapamycin), everolimus (RAD001), dactosilib (NVP-BEZ235), GSK2126458, WAY-001, WAY-600, WYE-687, WYE-354, SF1126, XL765, INK128 (MLN012), AZD8055, OSI027, AZD2014, or AP-23573.

[0401] In some embodiments, the anti-cancer therapy comprises a statin or a statin-based agent, e.g., alone or in combination with an ALK-targeted therapy. In some embodiments, the statin or statin-based agent is simvastatin, atorvastatin, fluvastatin, pitavastatin, pravastatin, rosuvastatin, or cerivastatin.

[0402] In some embodiments, the anti-cancer therapy comprises a MAPK inhibitor, e.g., alone or in combination with an ALK-targeted therapy. In some embodiments, the MAPK inhibitor is SB203580, SKF-86002, BIRB-796, SC-409, RJW-67657, BIRB-796, VX-745, R03201195, SB-242235, or MW181.

[0403] In some embodiments, the anti-cancer therapy comprises an EGFR inhibitor, e.g., alone or in combination with an ALK-targeted therapy. In some embodiments, the EGFR inhibitor is cetuximab, panitumumab, lapatinib, gefitinib, vandetanib, dacomitinib, icotinib, osimertinib (AZD9291), afatanib, olmutinib, EGF816 (nazartinib), avitinib (ACO0010), rociletinib (CO-1686), BMS-690514, YH5448, PF-06747775, ASP8273, PF299804, AP26113, necitumumab (e.g., Portrazza®), or erlotinib. In some embodiments, the EGFR inhibitor is gefitinib or cetuximab.

[0404] In some embodiments, the anti-cancer therapy comprises a cancer immunotherapy, such as a checkpoint inhibitor, cancer vaccine, cell-based therapy, T cell receptor (TCR)-based therapy, adjuvant immunotherapy, cytokine immunotherapy, and oncolytic virus therapy, e.g., alone or in combination with an ALK-targeted therapy. In some embodiments, the cancer immunotherapy comprises a small molecule, nucleic acid, polypeptide, carbohydrate, toxin, cell-based agent, or cell-binding agent. Examples of cancer immunotherapies are described in greater detail herein but are not intended to be limiting. In some embodiments, the cancer immunotherapy activates one or more aspects of the immune system to attack a cell (e.g., a tumor cell) that expresses a neoantigen, e.g., a neoantigen corresponding to a fusion nucleic acid molecule or polypeptide of the disclosure. The cancer immunotherapies of the present disclosure are contemplated for use as monotherapies, or in combination approaches comprising two or more in any combination or number, subject to medical judgement. Any of the cancer immunotherapies (optionally as monotherapies or in combination with another cancer immunotherapy or other therapeutic agent described herein) may find use in any of the methods described herein.

[0405] In some embodiments, the cancer immunotherapy comprises a cancer vaccine, e.g., alone or in combination with an ALK-targeted therapy. A range of cancer vaccines have been tested that employ different approaches to promoting an immune response against a cancer (see, e.g., Emens L A, Expert Opin Emerg Drugs 13(2): 295-308 (2008) and US20190367613). Approaches have been designed to enhance the response of B cells, T cells, or professional antigen-presenting cells against tumors. Exemplary types of cancer vaccines include, but are not limited to, DNA-based vaccines, RNA-based vaccines, virus transduced vaccines, peptide-based vaccines, dendritic cell vaccines, oncolytic viruses, whole tumor cell vaccines, tumor antigen vaccines, etc. In some embodiments, the cancer vaccine can be prophylactic or therapeutic. In some embodiments, the cancer vaccine is formulated as a peptide-based vaccine, a nucleic acid-based vaccine, an antibody based vaccine, or a cell based vaccine. For example, a vaccine composition can include naked cDNA in cationic lipid formulations; lipopeptides (e.g., Vitiello, A. et al, J. Clin. Invest. 95:341, 1995), naked cDNA or peptides, encapsulated e.g., in poly(DL-lactide-co-glycolide) (“PLG”) microspheres (see, e.g., Eldridge, et ah, Molec. Immunol. 28:287-294, 1991: Alonso et al, Vaccine 12:299-306, 1994; Jones et al, Vaccine 13:675-681, 1995); peptide composition contained in immune stimulating complexes (ISCOMS) (e.g., Takahashi et al, Nature 344:873-875, 1990; Hu et al, Clin. Exp. Immunol. 113:235-243, 1998); or multiple antigen peptide systems (MAPs) (see e.g., Tam, J. P., Proc. Natl Acad. Sci. U.S.A. 85:5409-5413, 1988; Tam, J. P., J. Immunol. Methods 196: 17-32, 1996). In some embodiments, a cancer vaccine is formulated as a peptide-based vaccine, or nucleic acid based vaccine in which the nucleic acid encodes the polypeptides. In some embodiments, a cancer vaccine is formulated as an antibody-based vaccine. In some embodiments, a cancer vaccine is formulated as a cell based vaccine. In some embodiments, the cancer vaccine is a peptide cancer vaccine, which in some embodiments is a personalized peptide vaccine. In some embodiments, the cancer vaccine is a multivalent long peptide, a multiple peptide, a peptide mixture, a hybrid peptide, or a peptide pulsed dendritic cell vaccine (see, e.g., Yamada et al, Cancer Sci, 104: 14-21, 2013). In some embodiments, such cancer vaccines augment the anti-cancer response.

[0406] In some embodiments, the cancer vaccine comprises a polynucleotide that encodes a neoantigen, e.g., a neoantigen corresponding to an ALK fusion nucleic acid molecule or polypeptide of the disclosure. In some embodiments, the cancer vaccine comprises DNA that encodes a neoantigen, e.g., a neoantigen corresponding to an ALK fusion nucleic acid molecule or polypeptide of the disclosure. In some embodiments, the cancer vaccine comprises RNA that encodes a neoantigen, e.g., a neoantigen corresponding to an ALK fusion nucleic acid molecule or polypeptide of the disclosure. In some embodiments, the cancer vaccine comprises a polynucleotide that encodes a neoantigen, e.g., a neoantigen corresponding to an ALK fusion nucleic acid molecule or polypeptide of the disclosure. In some embodiments, the cancer vaccine further comprises one or more additional antigens, neoantigens, or other sequences that promote antigen presentation and/or an immune response. In some embodiments, the polynucleotide is complexed with one or more additional agents, such as a liposome or lipoplex. In some embodiments, the polynucleotide(s) are taken up and translated by antigen presenting cells (APCs), which then present the neoantigen(s) via MHC class I on the APC cell surface.

[0407] In some embodiments, the cancer vaccine is selected from sipuleucel-T (e.g., Provenge®, Dendreon/Valeant Pharmaceuticals), which has been approved for treatment of asymptomatic, or minimally symptomatic metastatic castrate-resistant (hormone-refractory) prostate cancer; and talimogene laherparepvec (e.g., Imlygic®, BioVex/Amgen, previously known as T-VEC), a genetically modified oncolytic viral therapy approved for treatment of unresectable cutaneous, subcutaneous and nodal lesions in melanoma. In some embodiments, the cancer vaccine is selected from an oncolytic viral therapy such as pexastimogene devacirepvec (PexaVec/JX-594, SillaJen/formerly Jennerex Biotherapeutics), a thymidine kinase- (TK-) deficient vaccinia virus engineered to express GM-CSF, for hepatocellular carcinoma (NCT02562755) and melanoma (NCT00429312); pelareorep (e.g., Reolysin®, Oncolytics Biotech), a variant of respiratory enteric orphan virus (reovirus) which does not replicate in cells that are not RAS-activated, in numerous cancers, including colorectal cancer (NCT01622543), prostate cancer (NCT01619813), head and neck squamous cell cancer (NCT01166542), pancreatic adenocarcinoma (NCT00998322), and non-small cell lung cancer (NSCLC) (NCT 00861627); enadenotucirev (NG-348, PsiOxus, formerly known as ColoAd1), an adenovirus engineered to express a full length CD80 and an antibody fragment specific for the T-cell receptor CD3 protein, in ovarian cancer (NCT02028117), metastatic or advanced epithelial tumors such as in colorectal cancer, bladder cancer, head and neck squamous cell carcinoma and salivary gland cancer (NCT02636036); ONCOS-102 (Targovax/formerly Oncos), an adenovirus engineered to express GM-CSF, in melanoma (NCT03003676), and peritoneal disease, colorectal cancer or ovarian cancer (NCT02963831); GL-ONC1 (GLV-1h68/GLV-1h153, Genelux GmbH), vaccinia viruses engineered to express beta-galactosidase (beta-gal)/beta-glucoronidase or beta-gal/human sodium iodide symporter (hNIS), respectively, were studied in peritoneal carcinomatosis (NCT01443260), fallopian tube cancer, ovarian cancer (NCT 02759588); or CG0070 (Cold Genesys), an adenovirus engineered to express GM-CSF in bladder cancer (NCT02365818); anti-gp100; STINGVAX; GVAX; DCVaxL; and DNX-2401. In some embodiments, the cancer vaccine is selected from JX-929 (SillaJen/formerly Jennerex Biotherapeutics), a TK- and vaccinia growth factor-deficient vaccinia virus engineered to express cytosine deaminase, which is able to convert the prodrug 5-fluorocytosine to the cytotoxic drug 5-fluorouracil; TGO1 and TG02 (Targovax/formerly Oncos), peptide-based immunotherapy agents targeted for difficult-to-treat RAS mutations; and TILT-123 (TILT Biotherapeutics), an engineered adenovirus designated: Ad5/3-E2F-delta24-hTNFα-IRES-hIL20; and VSV-GP (ViraTherapeutics) a vesicular stomatitis virus (VSV) engineered to express the glycoprotein (GP) of lymphocytic choriomeningitis virus (LCMV), which can be further engineered to express antigens designed to raise an antigen-specific CD8+ T cell response. In some embodiments, the cancer vaccine comprises a vector-based tumor antigen vaccine. Vector-based tumor antigen vaccines can be used as a way to provide a steady supply of antigens to stimulate an anti-tumor immune response. In some embodiments, vectors encoding for tumor antigens are injected into an individual (possibly with pro-inflammatory or other attractants such as GM-CSF), taken up by cells in vivo to make the specific antigens, which then provoke the desired immune response. In some embodiments, vectors may be used to deliver more than one tumor antigen at a time, to increase the immune response. In addition, recombinant virus, bacteria or yeast vectors can trigger their own immune responses, which may also enhance the overall immune response.

[0408] In some embodiments, the cancer vaccine comprises a DNA-based vaccine. In some embodiments, DNA-based vaccines can be employed to stimulate an anti-tumor response. The ability of directly injected DNA that encodes an antigenic protein, to elicit a protective immune response has been demonstrated in numerous experimental systems. Vaccination through directly injecting DNA that encodes an antigenic protein, to elicit a protective immune response often produces both cell-mediated and humoral responses. Moreover, reproducible immune responses to DNA encoding various antigens have been reported in mice that last essentially for the lifetime of the animal (see, e.g., Yankauckas et al. (1993) DNA Cell Biol., 12: 771-776). In some embodiments, plasmid (or other vector) DNA that includes a sequence encoding a protein operably linked to regulatory elements required for gene expression is administered to individuals (e.g. human patients, non-human mammals, etc.). In some embodiments, the cells of the individual take up the administered DNA and the coding sequence is expressed. In some embodiments, the antigen so produced becomes a target against which an immune response is directed.

[0409] In some embodiments, the cancer vaccine comprises an RNA-based vaccine. In some embodiments, RNA-based vaccines can be employed to stimulate an anti-tumor response. In some embodiments, RNA-based vaccines comprise a self-replicating RNA molecule. In some embodiments, the self-replicating RNA molecule may be an alphavirus-derived RNA replicon. Self-replicating RNA (or “SAM”) molecules are well known in the art and can be produced by using replication elements derived from, e.g., alphaviruses, and substituting the structural viral proteins with a nucleotide sequence encoding a protein of interest. A self-replicating RNA molecule is typically a +-strand molecule which can be directly translated after delivery to a cell, and this translation provides a RNA-dependent RNA polymerase which then produces both antisense and sense transcripts from the delivered RNA. Thus, the delivered RNA leads to the production of multiple daughter RNAs. These daughter RNAs, as well as collinear subgenomic transcripts, may be translated themselves to provide in situ expression of an encoded polypeptide, or may be transcribed to provide further transcripts with the same sense as the delivered RNA which are translated to provide in situ expression of the antigen.

[0410] In some embodiments, the cancer immunotherapy comprises a cell-based therapy. In some embodiments, the cancer immunotherapy comprises a T cell-based therapy. In some embodiments, the cancer immunotherapy comprises an adoptive therapy, e.g., an adoptive T cell-based therapy. In some embodiments, the T cells are autologous or allogeneic to the recipient. In some embodiments, the T cells are CD8+ T cells. In some embodiments, the T cells are CD4+ T cells. Adoptive immunotherapy refers to a therapeutic approach for treating cancer or infectious diseases in which immune cells are administered to a host with the aim that the cells mediate either directly or indirectly specific immunity to (i.e., mount an immune response directed against) cancer cells. In some embodiments, the immune response results in inhibition of tumor and/or metastatic cell growth and/or proliferation, and in related embodiments, results in neoplastic cell death and/or resorption. The immune cells can be derived from a different organism/host (exogenous immune cells) or can be cells obtained from the subject organism (autologous immune cells). In some embodiments, the immune cells (e.g., autologous or allogeneic T cells (e.g., regulatory T cells, CD4+ T cells, CD8+ T cells, or gamma-delta T cells), NK cells, invariant NK cells, or NKT cells) can be genetically engineered to express antigen receptors such as engineered TCRs and/or chimeric antigen receptors (CARs). For example, the host cells (e.g., autologous or allogeneic T-cells) are modified to express a T cell receptor (TCR) having antigenic specificity for a cancer antigen. In some embodiments, NK cells are engineered to express a TCR. The NK cells may be further engineered to express a CAR. Multiple CARs and/or TCRs, such as to different antigens, may be added to a single cell type, such as T cells or NK cells. In some embodiments, the cells comprise one or more nucleic acids/expression constructs/vectors introduced via genetic engineering that encode one or more antigen receptors, and genetically engineered products of such nucleic acids. In some embodiments, the nucleic acids are heterologous, i.e., normally not present in a cell or sample obtained from the cell, such as one obtained from another organism or cell, which for example, is not ordinarily found in the cell being engineered and/or an organism from which such cell is derived. In some embodiments, the nucleic acids are not naturally occurring, such as a nucleic acid not found in nature (e.g. chimeric). In some embodiments, a population of immune cells can be obtained from a subject in need of therapy or suffering from a disease associated with reduced immune cell activity. Thus, the cells will be autologous to the subject in need of therapy. In some embodiments, a population of immune cells can be obtained from a donor, such as a histocompatibility-matched donor. In some embodiments, the immune cell population can be harvested from the peripheral blood, cord blood, bone marrow, spleen, or any other organ/tissue in which immune cells reside in said subject or donor. In some embodiments, the immune cells can be isolated from a pool of subjects and/or donors, such as from pooled cord blood. In some embodiments, when the population of immune cells is obtained from a donor distinct from the subject, the donor may be allogeneic, provided the cells obtained are subject-compatible, in that they can be introduced into the subject. In some embodiments, allogeneic donor cells may or may not be human-leukocyte-antigen (HLA)-compatible. In some embodiments, to be rendered subject-compatible, allogeneic cells can be treated to reduce immunogenicity.

[0411] In some embodiments, the cell-based therapy comprises a T cell-based therapy, such as autologous cells, e.g., tumor-infiltrating lymphocytes (TILs); T cells activated ex-vivo using autologous DCs, lymphocytes, artificial antigen-presenting cells (APCs) or beads coated with T cell ligands and activating antibodies, or cells isolated by virtue of capturing target cell membrane; allogeneic cells naturally expressing anti-host tumor T cell receptor (TCR); and non-tumor-specific autologous or allogeneic cells genetically reprogrammed or “redirected” to express tumor-reactive TCR or chimeric TCR molecules displaying antibody-like tumor recognition capacity known as “T-bodies”. Several approaches for the isolation, derivation, engineering or modification, activation, and expansion of functional anti-tumor effector cells have been described in the last two decades and may be used according to any of the methods provided herein. In some embodiments, the T cells are derived from the blood, bone marrow, lymph, umbilical cord, or lymphoid organs. In some embodiments, the cells are human cells. In some embodiments, the cells are primary cells, such as those isolated directly from a subject and/or isolated from a subject and frozen. In some embodiments, the cells include one or more subsets of T cells or other cell types, such as whole T cell populations, CD4+ cells, CD8+ cells, and subpopulations thereof, such as those defined by function, activation state, maturity, potential for differentiation, expansion, recirculation, localization, and/or persistence capacities, antigen-specificity, type of antigen receptor, presence in a particular organ or compartment, marker or cytokine secretion profile, and/or degree of differentiation. In some embodiments, the cells may be allogeneic and/or autologous. In some embodiments, such as for off-the-shelf technologies, the cells are pluripotent and/or multipotent, such as stem cells, such as induced pluripotent stem cells (iPSCs).

[0412] In some embodiments, the T cell-based therapy comprises a chimeric antigen receptor (CAR)-T cell-based therapy. This approach involves engineering a CAR that specifically binds to an antigen of interest and comprises one or more intracellular signaling domains for T cell activation. The CAR is then expressed on the surface of engineered T cells (CAR-T) and administered to a patient, leading to a T-cell-specific immune response against cancer cells expressing the antigen. In some embodiments, the CAR specifically binds a neoantigen, such as a neoantigen corresponding to an ALK fusion nucleic acid molecule or polypeptide of the disclosure.

[0413] In some embodiments, the T cell-based therapy comprises T cells expressing a recombinant T cell receptor (TCR). This approach involves identifying a TCR that specifically binds to an antigen of interest, which is then used to replace the endogenous or native TCR on the surface of engineered T cells that are administered to a patient, leading to a T-cell-specific immune response against cancer cells expressing the antigen. In some embodiments, the recombinant TCR specifically binds a neoantigen corresponding to a fusion nucleic acid molecule or polypeptide of the disclosure.

[0414] In some embodiments, the T cell-based therapy comprises tumor-infiltrating lymphocytes (TILs). For example, TILs can be isolated from a tumor or cancer of the present disclosure, then isolated and expanded in vitro. Some or all of these TILs may specifically recognize an antigen expressed by the tumor or cancer of the present disclosure. In some embodiments, the TILs are exposed to one or more neoantigens, e.g., a neoantigen corresponding to an ALK fusion nucleic acid molecule or polypeptide of the disclosure, in vitro after isolation. TILs are then administered to the patient (optionally in combination with one or more cytokines or other immune-stimulating substances).

[0415] In some embodiments, the cell-based therapy comprises a natural killer (NK) cell-based therapy. Natural killer (NK) cells are a subpopulation of lymphocytes that have spontaneous cytotoxicity against a variety of tumor cells, virus-infected cells, and some normal cells in the bone marrow and thymus. NK cells are critical effectors of the early innate immune response toward transformed and virus-infected cells. NK cells can be detected by specific surface markers, such as CD16, CD56, and CD8 in humans. NK cells do not express T-cell antigen receptors, the pan T marker CD3, or surface immunoglobulin B cell receptors. In some embodiments, NK cells are derived from human peripheral blood mononuclear cells (PBMC), unstimulated leukapheresis products (PBSC), human embryonic stem cells (hESCs), induced pluripotent stem cells (iPSCs), bone marrow, or umbilical cord blood by methods well known in the art.

[0416] In some embodiments, the cell-based therapy comprises a dendritic cell (DC)-based therapy, e.g., a dendritic cell vaccine. In some embodiments, the DC vaccine comprises antigen-presenting cells that are able to induce specific T cell immunity, which are harvested from the patient or from a donor. In some embodiments, the DC vaccine can then be exposed in vitro to a peptide antigen, for which T cells are to be generated in the patient. In some embodiments, dendritic cells loaded with the antigen are then injected back into the patient. In some embodiments, immunization may be repeated multiple times if desired. Methods for harvesting, expanding, and administering dendritic cells are known in the art; see, e.g., WO2019178081. Dendritic cell vaccines (such as Sipuleucel-T, also known as APC8015 and PROVENGE®) are vaccines that involve administration of dendritic cells that act as APCs to present one or more cancer-specific antigens to the patient's immune system. In some embodiments, the dendritic cells are autologous or allogeneic to the recipient.

[0417] In some embodiments, the cancer immunotherapy comprises a TCR-based therapy. In some embodiments, the cancer immunotherapy comprises administration of one or more TCRs or TCR-based therapeutics that specifically bind an antigen expressed by a cancer of the present disclosure, e.g., a neoantigen corresponding to an ALK fusion nucleic acid molecule or polypeptide of the disclosure. In some embodiments, the TCR-based therapeutic may further include a moiety that binds an immune cell (e.g., a T cell), such as an antibody or antibody fragment that specifically binds a T cell surface protein or receptor (e.g., an anti-CD3 antibody or antibody fragment).

[0418] In some embodiments, the immunotherapy comprises adjuvant immunotherapy. Adjuvant immunotherapy comprises the use of one or more agents that activate components of the innate immune system, e.g., HILTONOL® (imiquimod), which targets the TLR7 pathway.

[0419] In some embodiments, the immunotherapy comprises cytokine immunotherapy. Cytokine immunotherapy comprises the use of one or more cytokines that activate components of the immune system. Examples include, but are not limited to, aldesleukin (e.g., PROLEUKIN®; interleukin-2), interferon alfa-2a (e.g., ROFERON®-A), interferon alfa-2b (e.g., INTRON®-A), and peginterferon alfa-2b (e.g., PEGINTRON®).

[0420] In some embodiments, the immunotherapy comprises oncolytic virus therapy. Oncolytic virus therapy uses genetically modified viruses to replicate in and kill cancer cells, leading to the release of antigens that stimulate an immune response. In some embodiments, replication-competent oncolytic viruses expressing a tumor antigen comprise any naturally occurring (e.g., from a “field source”) or modified replication-competent oncolytic virus. In some embodiments, the oncolytic virus, in addition to expressing a tumor antigen, may be modified to increase selectivity of the virus for cancer cells. In some embodiments, replication-competent oncolytic viruses include, but are not limited to, oncolytic viruses that are a member in the family of myoviridae, siphoviridae, podpviridae, teciviridae, corticoviridae, plasmaviridae, lipothrixviridae, fuselloviridae, poxyiridae, iridoviridae, phycodnaviridae, baculoviridae, herpesviridae, adnoviridae, papovaviridae, polydnaviridae, inoviridae, microviridae, geminiviridae, circoviridae, parvoviridae, hcpadnaviridae, retroviridae, cyctoviridae, reoviridae, birnaviridae, paramyxoviridae, rhabdoviridae, filoviridae, orthomyxoviridae, bunyaviridae, arenaviridae, Leviviridae, picornaviridae, sequiviridae, comoviridae, potyviridae, caliciviridae, astroviridae, nodaviridae, tetraviridae, tombusviridae, coronaviridae, glaviviridae, togaviridae, and barnaviridae. In some embodiments, replication-competent oncolytic viruses include adenovirus, retrovirus, reovirus, rhabdovirus, Newcastle Disease virus (NDV), polyoma virus, vaccinia virus (VacV), herpes simplex virus, picornavirus, coxsackie virus and parvovirus. In some embodiments, a replicative oncolytic vaccinia virus expressing a tumor antigen may be engineered to lack one or more functional genes in order to increase the cancer selectivity of the virus. In some embodiments, an oncolytic vaccinia virus is engineered to lack thymidine kinase (TK) activity. In some embodiments, the oncolytic vaccinia virus may be engineered to lack vaccinia virus growth factor (VGF). In some embodiments, an oncolytic vaccinia virus may be engineered to lack both VGF and TK activity. In some embodiments, an oncolytic vaccinia virus may be engineered to lack one or more genes involved in evading host interferon (IFN) response such as E3L, K3L, B18R, or B8R. In some embodiments, a replicative oncolytic vaccinia virus is a Western Reserve, Copenhagen, Lister or Wyeth strain and lacks a functional TK gene. In some embodiments, the oncolytic vaccinia virus is a Western Reserve, Copenhagen, Lister or Wyeth strain lacking a functional B18R and/or B8R gene. In some embodiments, a replicative oncolytic vaccinia virus expressing a tumor antigen may be locally or systemically administered to a subject, e.g. via intratumoral, intraperitoneal, intravenous, intra-arterial, intramuscular, intradermal, intracranial, subcutaneous, or intranasal administration.

[0421] In some embodiments, the anti-cancer therapy comprises an immune checkpoint inhibitor, e.g., alone or in combination with an ALK-targeted therapy. In some embodiments, the methods provided herein comprise administering to an individual an effective amount of an immune checkpoint inhibitor. As is known in the art, a checkpoint inhibitor targets at least one immune checkpoint protein to alter the regulation of an immune response. Immune checkpoint proteins include, e.g., CTLA4, PD-L1, PD-1, PD-L2, VISTA, B7-H2, B7-H3, B7-H4, B7-H6, 2B4, ICOS, HVEM, CEACAM, LAIR1, CD80, CD86, CD276, VTCN1, MHC class I, MHC class II, GALS, adenosine, TGFR, CSFIR, MICA/B, arginase, CD160, gp49B, PIR-B, KIR family receptors, TIM-1, TIM-3, TIM-4, LAG-3, BTLA, SIRPalpha (CD47), CD48, 2B4 (CD244), B7.1, B7.2, ILT-2, ILT-4, TIGIT, LAG-3, BTLA, IDO, OX40, and A2aR. In some embodiments, molecules involved in regulating immune checkpoints include, but are not limited to: PD-1 (CD279), PD-L1 (B7-H1, CD274), PD-L2 (B7-CD, CD273), CTLA-4 (CD152), HVEM, BTLA (CD272), a killer-cell immunoglobulin-like receptor (KIR), LAG-3 (CD223), TIM-3 (HAVCR2), CEACAM, CEACAM-1, CEACAM-3, CEACAM-5, GAL9, VISTA (PD-1H), TIGIT, LAIR1, CD160, 2B4, TGFRbeta, A2AR, GITR (CD357), CD80 (B7-1), CD86 (B7-2), CD276 (B7-H3), VTCN1 (B7-H4), MHC class I, MHC class II, GALS, adenosine, TGFR, B7-H1, OX40 (CD134), CD94 (KLRD1), CD137 (4-1BB), CD137L (4-1BBL), CD40, IDO, CSF1R, CD40L, CD47, CD70 (CD27L), CD226, HHLA2, ICOS (CD278), ICOSL (CD275), LIGHT (TNFSF14, CD258), NKG2a, NKG2d, OX40L (CD134L), PVR (NECL5, CD155), SIRPa, MICA/B, and/or arginase. In some embodiments, an immune checkpoint inhibitor (i.e., a checkpoint inhibitor) decreases the activity of a checkpoint protein that negatively regulates immune cell function, e.g., in order to enhance T cell activation and/or an anti-cancer immune response. In other embodiments, a checkpoint inhibitor increases the activity of a checkpoint protein that positively regulates immune cell function, e.g., in order to enhance T cell activation and/or an anti-cancer immune response. In some embodiments, the checkpoint inhibitor is an antibody. Examples of checkpoint inhibitors include, without limitation, a PD-1 axis binding antagonist, a PD-L1 axis binding antagonist (e.g., an anti-PD-L1 antibody, e.g., atezolizumab (MPDL3280A)), an antagonist directed against a co-inhibitory molecule (e.g., a CTLA4 antagonist (e.g., an anti-CTLA4 antibody), a TIM-3 antagonist (e.g., an anti-TIM-3 antibody), or a LAG-3 antagonist (e.g., an anti-LAG-3 antibody)), or any combination thereof. In some embodiments, the immune checkpoint inhibitors comprise drugs such as small molecules, recombinant forms of ligand or receptors, or antibodies, such as human antibodies (see, e.g., International Patent Publication WO2015016718; Pardoll, Nat Rev Cancer, 12(4): 252-64, 2012; both incorporated herein by reference). In some embodiments, known inhibitors of immune checkpoint proteins or analogs thereof may be used, in particular chimerized, humanized or human forms of antibodies may be used.

[0422] In some embodiments, the checkpoint inhibitor is a PD-L1 axis binding antagonist. PD-1 (programmed death 1) is also referred to in the art as “programmed cell death 1,” “PDCD1,” “CD279,” and “SLEB2.” An exemplary human PD-1 is shown in UniProtKB/Swiss-Prot Accession No. Q15116. PD-L1 (programmed death ligand 1) is also referred to in the art as “programmed cell death 1 ligand 1,” “PDCD1 LG1,” “CD274,” “B7-H,” and “PDL1.” An exemplary human PD-L1 is shown in UniProtKB/Swiss-Prot Accession No.Q9NZQ7.1. PD-L2 (programmed death ligand 2) is also referred to in the art as “programmed cell death 1 ligand 2,” “PDCD1 LG2,” “CD273,” “B7-DC,” “Btdc,” and “PDL2.” An exemplary human PD-L2 is shown in UniProtKB/Swiss-Prot Accession No. Q9BQ51. In some instances, PD-1, PD-L1, and PD-L2 are human PD-1, PD-L1 and PD-L2.

[0423] In some instances, the PD-1 binding antagonist is a molecule that inhibits the binding of PD-1 to its ligand binding partners. In a specific embodiment, the PD-1 ligand binding partners are PD-L1 and/or PD-L2. In another instance, a PD-L1 binding antagonist is a molecule that inhibits the binding of PD-L1 to its binding ligands. In a specific embodiment, PD-L1 binding partners are PD-1 and/or B7-1. In another instance, the PD-L2 binding antagonist is a molecule that inhibits the binding of PD-L2 to its ligand binding partners. In a specific embodiment, the PD-L2 binding ligand partner is PD-1. The antagonist may be an antibody, an antigen binding fragment thereof, an immunoadhesin, a fusion protein, or an oligopeptide. In some embodiments, the PD-1 binding antagonist is a small molecule, a nucleic acid, a polypeptide (e.g., antibody), a carbohydrate, a lipid, a metal, or a toxin.

[0424] In some instances, the PD-1 binding antagonist is an anti-PD-1 antibody (e.g., a human antibody, a humanized antibody, or a chimeric antibody), for example, as described below. In some instances, the anti-PD-1 antibody is one or more of MDX-1 106 (nivolumab), MK-3475 (pembrolizumab, e.g., Keytruda®), MEDI-0680 (AMP-514), PDR001, REGN2810, MGA-012, JNJ-63723283, BI 754091, or BGB-108. In other instances, the PD-1 binding antagonist is an immunoadhesin (e.g., an immunoadhesin comprising an extracellular or PD-1 binding portion of PD-L1 or PD-L2 fused to a constant region (e.g., an Fc region of an immunoglobulin sequence)). In some instances, the PD-1 binding antagonist is AMP-224. Other examples of anti-PD-1 antibodies include, but are not limited to, MEDI-0680 (AMP-514; AstraZeneca), PDR001 (CAS Registry No. 1859072-53-9; Novartis), REGN2810 (e.g., LIBTAYO® or cemiplimab-rwlc; Regeneron), BGB-108 (BeiGene), BGB-A317 (BeiGene), BI 754091, JS-001 (Shanghai Junshi), STI-A1110 (Sorrento), INCSHR-1210 (Incyte), PF-06801591 (Pfizer), TSR-042 (also known as ANB011; Tesaro/AnaptysBio), AM0001 (ARMO Biosciences), ENUM 244C8 (Enumeral Biomedical Holdings), or ENUM 388D4 (Enumeral Biomedical Holdings). In some embodiments, the PD-1 axis binding antagonist comprises tislelizumab (BGB-A317), BGB-108, STI-A1110, AM0001, BI 754091, sintilimab (IBI308), cetrelimab (JNJ-63723283), toripalimab (JS-001), camrelizumab (SHR-1210, INCSHR-1210, HR-301210), MEDI-0680 (AMP-514), MGA-012 (INCMGA 0012), nivolumab (BMS-936558, MDX1106, ONO-4538), spartalizumab (PDR001), pembrolizumab (MK-3475, SCH 900475, e.g., Keytruda®), PF-06801591, cemiplimab (REGN-2810, REGEN2810), dostarlimab (TSR-042, ANB011), FITC-YT-16 (PD-1 binding peptide), APL-501 or CBT-501 or genolimzumab (GB-226), AB-122, AK105, AMG 404, BCD-100, F520, HLX10, HX008, JTX-4014, LZM009, Sym021, PSB205, AMP-224 (fusion protein targeting PD-1), CX-188 (PD-1 probody), AGEN-2034, GLS-010, budigalimab (ABBV-181), AK-103, BAT-1306, CS-1003, AM-0001, TILT-123, BH-2922, BH-2941, BH-2950, ENUM-244C8, ENUM-388D4, HAB-21, H EISCOI 11-003, IKT-202, MCLA-134, MT-17000, PEGMP-7, PRS-332, RXI-762, STI-1110, VXM-10, XmAb-23104, AK-112, HLX-20, SSI-361, AT-16201, SNA-01, AB122, PD1-PIK, PF-06936308, RG-7769, CAB PD-1 Abs, AK-123, MEDI-3387, MEDI-5771, 4H1128Z-E27, REMD-288, SG-001, BY-24.3, CB-201, IBI-319, ONCR-177, Max-1, CS-4100, JBI-426, CCC-0701, or CCX-4503, or derivatives thereof.

[0425] In some embodiments, the PD-L1 binding antagonist is a small molecule that inhibits PD-1. In some embodiments, the PD-L1 binding antagonist is a small molecule that inhibits PD-L1. In some embodiments, the PD-L1 binding antagonist is a small molecule that inhibits PD-L1 and VISTA or PD-L1 and TIM3. In some embodiments, the PD-L1 binding antagonist is CA-170 (also known as AUPM-170). In some embodiments, the PD-L1 binding antagonist is an anti-PD-L1 antibody. In some embodiments, the anti-PD-L1 antibody can bind to a human PD-L1, for example a human PD-L1 as shown in UniProtKB/Swiss-Prot Accession No.Q9NZQ7.1, or a variant thereof. In some embodiments, the PD-L1 binding antagonist is a small molecule, a nucleic acid, a polypeptide (e.g., antibody), a carbohydrate, a lipid, a metal, or a toxin.

[0426] In some instances, the PD-L1 binding antagonist is an anti-PD-L1 antibody, for example, as described below. In some instances, the anti-PD-L1 antibody is capable of inhibiting the binding between PD-L1 and PD-1, and/or between PD-L1 and B7-1. In some instances, the anti-PD-L1 antibody is a monoclonal antibody. In some instances, the anti-PD-L1 antibody is an antibody fragment selected from a Fab, Fab′-SH, Fv, scFv, or (Fab′)2 fragment. In some instances, the anti-PD-L1 antibody is a humanized antibody. In some instances, the anti-PD-L1 antibody is a human antibody. In some instances, the anti-PD-L1 antibody is selected from YW243.55.S70, MPDL3280A (atezolizumab), MDX-1 105, MED14736 (durvalumab), or MSB0010718C (avelumab). In some embodiments, the PD-L1 axis binding antagonist comprises atezolizumab, avelumab, durvalumab (imfinzi), BGB-A333, SHR-1316 (HTI-1088), CK-301, BMS-936559, envafolimab (KN035, ASC22), CS1001, MDX-1105 (BMS-936559), LY3300054, STI-A1014, FAZ053, CX-072, INCB086550, GNS-1480, CA-170, CK-301, M-7824, HTI-1088 (HTI-131, SHR-1316), MSB-2311, AK-106, AVA-004, BBI-801, CA-327, CBA-0710, CBT-502, FPT-155, IKT-201, IKT-703, 10-103, JS-003, KD-033, KY-1003, MCLA-145, MT-5050, SNA-02, BCD-135, APL-502 (CBT-402 or TQB2450), IMC-001, KD-045, INBRX-105, KN-046, IMC-2102, IMC-2101, KD-005, IMM-2502, 89Zr-CX-072, 89Zr-DFO-6E11, KY-1055, MEDI-1109, MT-5594, SL-279252, DSP-106, Gensci-047, REMD-290, N-809, PRS-344, FS-222, GEN-1046, BH-29xx, or FS-118, or a derivative thereof.

[0427] In some embodiments, the checkpoint inhibitor is an antagonist of CTLA4. In some embodiments, the checkpoint inhibitor is a small molecule antagonist of CTLA4. In some embodiments, the checkpoint inhibitor is an anti-CTLA4 antibody. CTLA4 is part of the CD28-B7 immunoglobulin superfamily of immune checkpoint molecules that acts to negatively regulate T cell activation, particularly CD28-dependent T cell responses. CTLA4 competes for binding to common ligands with CD28, such as CD80 (B7-1) and CD86 (B7-2), and binds to these ligands with higher affinity than CD28. Blocking CTLA4 activity (e.g., using an anti-CTLA4 antibody) is thought to enhance CD28-mediated costimulation (leading to increased T cell activation/priming), affect T cell development, and/or deplete Tregs (such as intratumoral Tregs). In some embodiments, the CTLA4 antagonist is a small molecule, a nucleic acid, a polypeptide (e.g., antibody), a carbohydrate, a lipid, a metal, or a toxin. In some embodiments, the CTLA-4 inhibitor comprises ipilimumab (IBI310, BMS-734016, MDX010, MDX-CTLA4, MED14736), tremelimumab (CP-675, CP-675,206), APL-509, AGEN1884, CS1002, AGEN1181, Abatacept (Orencia, BMS-188667, RG2077), BCD-145, ONC-392, ADU-1604, REGN4659, ADG116, KN044, KN046, or a derivative thereof.

[0428] In some embodiments, the anti-PD-1 antibody or antibody fragment is MDX-1106 (nivolumab), MK-3475 (pembrolizumab, e.g., Keytruda®), MEDI-0680 (AMP-514), PDR001, REGN2810, MGA-012, JNJ-63723283, BI 754091, BGB-108, BGB-A317, JS-001, STI-A1110, INCSHR-1210, PF-06801591, TSR-042, AM0001, ENUM 244C8, or ENUM 388D4. In some embodiments, the PD-1 binding antagonist is an anti-PD-1 immunoadhesin. In some embodiments, the anti-PD-1 immunoadhesin is AMP-224. In some embodiments, the anti-PD-L1 antibody or antibody fragment is YW243.55.S70, MPDL3280A (atezolizumab), MDX-1105, MEDI4736 (durvalumab), MSB0010718C (avelumab), LY3300054, STI-A1014, KN035, FAZ053, or CX-072.

[0429] In some embodiments, the immune checkpoint inhibitor comprises a LAG-3 inhibitor (e.g., an antibody, an antibody conjugate, or an antigen-binding fragment thereof). In some embodiments, the LAG-3 inhibitor comprises a small molecule, a nucleic acid, a polypeptide (e.g., an antibody), a carbohydrate, a lipid, a metal, or a toxin. In some embodiments, the LAG-3 inhibitor comprises a small molecule. In some embodiments, the LAG-3 inhibitor comprises a LAG-3 binding agent. In some embodiments, the LAG-3 inhibitor comprises an antibody, an antibody conjugate, or an antigen-binding fragment thereof. In some embodiments, the LAG-3 inhibitor comprises eftilagimod alpha (IMP321, IMP-321, EDDP-202, EOC-202), relatlimab (BMS-986016), GSK2831781 (IMP-731), LAG525 (IMP701), TSR-033, EVIP321 (soluble LAG-3 protein), BI 754111, IMP761, REGN3767, MK-4280, MGD-013, XmAb22841, INCAGN-2385, ENUM-006, AVA-017, AM-0003, iOnctura anti-LAG-3 antibody, Arcus Biosciences LAG-3 antibody, Sym022, a derivative thereof, or an antibody that competes with any of the preceding.

[0430] In some embodiments, the anti-cancer therapy comprises an immunoregulatory molecule or a cytokine, e.g., alone or in combination with an ALK-targeted therapy. An immunoregulatory profile is required to trigger an efficient immune response and balance the immunity in a subject. Examples of suitable immunoregulatory cytokines include, but are not limited to, interferons (e.g., IFNα, IFNβ and IFNγ), interleukins (e.g., IL-1, IL-2, IL-3, IL-4, IL-5, IL-6, IL-7, IL-8, IL-9, IL-10, IL-12 and IL-20), tumor necrosis factors (e.g., TNFα and TNFβ), erythropoietin (EPO), FLT-3 ligand, gIp10, TCA-3, MCP-1, MIF, MIP-1α, MIP-1β, Rantes, macrophage colony stimulating factor (M-CSF), granulocyte colony stimulating factor (G-CSF), or granulocyte-macrophage colony stimulating factor (GM-CSF), as well as functional fragments thereof. In some embodiments, any immunomodulatory chemokine that binds to a chemokine receptor, i.e., a CXC, CC, C, or CX3C chemokine receptor, can be used in the context of the present disclosure. Examples of chemokines include, but are not limited to, MIP-3a (Lax), MIP-3β, Hcc-1, MPIF-1, MPIF-2, MCP-2, MCP-3, MCP-4, MCP-5, Eotaxin, Tarc, Elc, 1309, IL-8, GCP-2 Groα, Gro-β, Nap-2, Ena-78, Ip-10, MIG, I-Tac, SDF-1, or BCA-1 (Blc), as well as functional fragments thereof. In some embodiments, the immunoregulatory molecule is included with any of the treatments provided herein.

[0431] In some embodiments, the immune checkpoint inhibitor is monovalent and/or monospecific. In some embodiments, the immune checkpoint inhibitor is multivalent and/or multispecific.

[0432] In some embodiments, the anti-cancer therapy comprises an anti-cancer agent that inhibits expression of a nucleic acid that comprises or encodes an ALK fusion nucleic acid molecule of the disclosure or a portion thereof, or an ALK fusion polypeptide of the disclosure, or a portion thereof. In some embodiments, the anti-cancer therapy comprises a nucleic acid molecule, such as a dsRNA, an siRNA, or an shRNA. As is known in the art, dsRNAs having a duplex structure are effective at inducing RNA interference (RNAi). In some embodiments, the anti-cancer therapy comprises a small interfering RNA molecule (siRNA). dsRNAs and siRNAs can be used to silence gene expression in mammalian cells (e.g., human cells). In some embodiments, a dsRNA of the disclosure comprises any of between about 5 and about 10 base pairs, between about 10 and about 12 base pairs, between about 12 and about 15 base pairs, between about 15 and about 20 base pairs, between about 20 and 23 base pairs, between about 23 and about 25 base pairs, between about 25 and about 27 base pairs, or between about 27 and about 30 base pairs. As is known in the art, siRNAs are small dsRNAs that optionally include overhangs. In some embodiments, the duplex region of an siRNA is between about 18 and 25 nucleotides, e.g., any of 18, 19, 20, 21, 22, 23, 24, or 25 nucleotides. siRNAs may also include short hairpin RNAs (shRNAs), e.g., with approximately 29-base-pair stems and 2-nucleotide 3′ overhangs. In some embodiments, a dsRNA, an siRNA, or an shRNA of the disclosure comprises a nucleotide sequence that is configured to hybridize to a nucleic acid that comprises or encodes an ALK fusion nucleic acid molecule of the disclosure or a portion thereof comprising a breakpoint. Methods for designing, optimizing, producing, and using dsRNAs, siRNAs, or shRNAs, are known in the art.

[0433] In some embodiments, the anti-cancer therapy comprises a chemotherapy, e.g., alone or in combination with an ALK-targeted therapy. Examples of chemotherapeutic agents include alkylating agents, such as thiotepa and cyclosphosphamide; alkyl sulfonates, such as busulfan, improsulfan, and piposulfan; aziridines, such as benzodopa, carboquone, meturedopa, and uredopa; ethylenimines and methylamelamines, including altretamine, triethylenemelamine, trietylenephosphoramide, triethiylenethiophosphoramide, and trimethylolomelamine; acetogenins (especially bullatacin and bullatacinone); a camptothecin (including the synthetic analogue topotecan); bryostatin; callystatin; CC-1065 (including its adozelesin, carzelesin and bizelesin synthetic analogues); cryptophycins (particularly cryptophycin 1 and cryptophycin 8); dolastatin; duocarmycin (including the synthetic analogues, KW-2189 and CB1-TM1); eleutherobin; pancratistatin; a sarcodictyin; spongistatin; nitrogen mustards, such as chlorambucil, chlomaphazine, cholophosphamide, estramustine, ifosfamide, mechlorethamine, mechlorethamine oxide hydrochloride, melphalan, novembichin, phenesterine, prednimustine, trofosfamide, and uracil mustard; nitrosureas, such as carmustine, chlorozotocin, fotemustine, lomustine, nimustine, and ranimnustine; antibiotics, such as the enediyne antibiotics (e.g., calicheamicin, especially calicheamicin gammall and calicheamicin omegall); dynemicin, including dynemicin A; bisphosphonates, such as clodronate; an esperamicin; as well as neocarzinostatin chromophore and related chromoprotein enediyne antiobiotic chromophores, aclacinomysins, actinomycin, authramycin, azaserine, bleomycins, cactinomycin, carabicin, carminomycin, carzinophilin, chromomycinis, dactinomycin, daunorubicin, detorubicin, 6-diazo-5-oxo-L-norleucine, doxorubicin (including morpholino-doxorubicin, cyanomorpholino-doxorubicin, 2-pyrrolino-doxorubicin and deoxydoxorubicin), epirubicin, esorubicin, idarubicin, marcellomycin, mitomycins, such as mitomycin C, mycophenolic acid, nogalamycin, olivomycins, peplomycin, potfiromycin, puromycin, quelamycin, rodorubicin, streptonigrin, streptozocin, tubercidin, ubenimex, zinostatin, and zorubicin; anti-metabolites, such as methotrexate and 5-fluorouracil (5-FU); folic acid analogues, such as denopterin, pteropterin, and trimetrexate; purine analogs, such as fludarabine, 6-mercaptopurine, thiamiprine, and thioguanine; pyrimidine analogs, such as ancitabine, azacitidine, 6-azauridine, carmofur, cytarabine, dideoxyuridine, doxifluridine, enocitabine, and floxuridine; androgens, such as calusterone, dromostanolone propionate, epitiostanol, mepitiostane, and testolactone; anti-adrenals, such as mitotane and trilostane; folic acid replenishers such as folinic acid; aceglatone; aldophosphamide glycoside; aminolevulinic acid; eniluracil; amsacrine; bestrabucil; bisantrene; edatraxate; defofamine; demecolcine; diaziquone; elformithine; elliptinium acetate; an epothilone; etoglucid; gallium nitrate; hydroxyurea; lentinan; lonidainine; maytansinoids, such as maytansine and ansamitocins; mitoguazone; mitoxantrone; mopidanmol; nitraerine; pentostatin; phenamet; pirarubicin; losoxantrone; podophyllinic acid; 2-ethylhydrazide; procarbazine; PSK polysaccharide complex; razoxane; rhizoxin; sizofiran; spirogermanium; tenuazonic acid; triaziquone; 2,2′, 2″-trichlorotriethylamine; trichothecenes (especially T-2 toxin, verracurin A, roridin A and anguidine); urethan; vindesine; dacarbazine; mannomustine; mitobronitol; mitolactol; pipobroman; gacytosine; arabinoside (“Ara-C”); cyclophosphamide; taxoids, e.g., paclitaxel and docetaxel gemcitabine; 6-thioguanine; mercaptopurine; platinum coordination complexes, such as cisplatin, oxaliplatin, and carboplatin; vinblastine; platinum; etoposide (VP-16); ifosfamide; mitoxantrone; vincristine; vinorelbine; novantrone; teniposide; edatrexate; daunomycin; aminopterin; xeloda; ibandronate; irinotecan (e.g., CPT-11); topoisomerase inhibitor RFS 2000; difluorometlhylomithine (DMFO); retinoids, such as retinoic acid; capecitabine; carboplatin, procarbazine, plicomycin, gemcitabine, navelbine, famesyl-protein tansferase inhibitors, transplatinum, and pharmaceutically acceptable salts, acids, or derivatives of any of the above.

[0434] Some non-limiting examples of chemotherapeutic drugs which can be combined with anti-cancer therapies of the present disclosure are carboplatin (Paraplatin), cisplatin (Platinol, Platinol-AQ), cyclophosphamide (Cytoxan, Neosar), docetaxel (Taxotere), doxorubicin (Adriamycin), erlotinib (Tarceva), etoposide (VePesid), fluorouracil (5-FU), gemcitabine (Gemzar), imatinib mesylate (Gleevec), irinotecan (Camptosar), methotrexate (Folex, Mexate, Amethopterin), paclitaxel (Taxol, Abraxane), sorafinib (Nexavar), sunitinib (Sutent), topotecan (Hycamtin), vincristine (Oncovin, Vincasar PFS), and vinblastine (Velban).

[0435] In some embodiments, the anti-cancer therapy comprises a kinase inhibitor, e.g., alone or in combination with an ALK-targeted therapy. Examples of kinase inhibitors include those that target one or more receptor tyrosine kinases, e.g., BCR-ABL, B-Raf, EGFR, HER-2/ErbB2, IGF-IR, PDGFR-a, PDGFR-β, cKit, Flt-4, Flt3, FGFR1, FGFR2, FGFR3, FGFR4, CSF1R, c-Met, ROSI, RON, c-Ret, or ALK; one or more cytoplasmic tyrosine kinases, e.g., c-SRC, c-YES, Abl, or JAK-2; one or more serine/threonine kinases, e.g., ATM, Aurora A & B, CDKs, mTOR, PKCi, PLKs, b-Raf, c-Raf, S6K, or STK11/LKB1; or one or more lipid kinases, e.g., PI3K or SKI. Small molecule kinase inhibitors include PHA-739358, nilotinib, dasatinib, PD166326, NSC 743411, lapatinib (GW-572016), canertinib (CI-1033), semaxinib (SU5416), vatalanib (PTK787/ZK222584), sutent (SU1 1248), sorafenib (BAY 43-9006), or leflunomide (SU101). Additional non-limiting examples of tyrosine kinase inhibitors include imatinib (Gleevec/Glivec) and gefitinib (Iressa).

[0436] In some embodiments, the anti-cancer therapy comprises an anti-angiogenic agent, e.g., alone or in combination with an ALK-targeted therapy. Angiogenesis inhibitors prevent the extensive growth of blood vessels (angiogenesis) that tumors require to survive. Non-limiting examples of angiogenesis-mediating molecules or angiogenesis inhibitors which may be used in the methods of the present disclosure include soluble VEGF (for example: VEGF isoforms, e.g., VEGF121 and VEGF165; VEGF receptors, e.g., VEGFR1, VEGFR2; and co-receptors, e.g., Neuropilin-1 and Neuropilin-2), NRP-1, angiopoietin 2, TSP-1 and TSP-2, angiostatin and related molecules, endostatin, vasostatin, calreticulin, platelet factor-4, TIMP and CDAI, Meth-1 and Meth-2, IFNα, IFN-β and IFN-γ, CXCL10, IL-4, IL-12 and IL-18, prothrombin (kringle domain-2), antithrombin III fragment, prolactin, VEGI, SPARC, osteopontin, maspin, canstatin, proliferin-related protein, restin and drugs such as bevacizumab, itraconazole, carboxyamidotriazole, TNP-470, CM101, IFN-α platelet factor-4, suramin, SU5416, thrombospondin, VEGFR antagonists, angiostatic steroids and heparin, cartilage-derived angiogenesis inhibitory factor, matrix metalloproteinase inhibitors, 2-methoxyestradiol, tecogalan, tetrathiomolybdate, thalidomide, thrombospondin, prolactina v β3 inhibitors, linomide, or tasquinimod. In some embodiments, known therapeutic candidates that may be used according to the methods of the disclosure include naturally occurring angiogenic inhibitors, including without limitation, angiostatin, endostatin, or platelet factor-4. In another embodiment, therapeutic candidates that may be used according to the methods of the disclosure include, without limitation, specific inhibitors of endothelial cell growth, such as TNP-470, thalidomide, and interleukin-12. Still other anti-angiogenic agents that may be used according to the methods of the disclosure include those that neutralize angiogenic molecules, including without limitation, antibodies to fibroblast growth factor, antibodies to vascular endothelial growth factor, antibodies to platelet derived growth factor, or antibodies or other types of inhibitors of the receptors of EGF, VEGF or PDGF. In some embodiments, anti-angiogenic agents that may be used according to the methods of the disclosure include, without limitation, suramin and its analogs, and tecogalan. In other embodiments, anti-angiogenic agents that may be used according to the methods of the disclosure include, without limitation, agents that neutralize receptors for angiogenic factors or agents that interfere with vascular basement membrane and extracellular matrix, including, without limitation, metalloprotease inhibitors and angiostatic steroids. Another group of anti-angiogenic compounds that may be used according to the methods of the disclosure includes, without limitation, anti-adhesion molecules, such as antibodies to integrin alpha v beta 3. Still other anti-angiogenic compounds or compositions that may be used according to the methods of the disclosure include, without limitation, kinase inhibitors, thalidomide, itraconazole, carboxyamidotriazole, CM101, IFN-α, IL-12, SU5416, thrombospondin, cartilage-derived angiogenesis inhibitory factor, 2-methoxyestradiol, tetrathiomolybdate, thrombospondin, prolactin, and linomide. In one particular embodiment, the anti-angiogenic compound that may be used according to the methods of the disclosure is an antibody to VEGF, such as Avastin®/bevacizumab (Genentech).

[0437] In some embodiments, the anti-cancer therapy comprises an anti-DNA repair therapy, e.g., alone or in combination with an ALK-targeted therapy. In some embodiments, the anti-DNA repair therapy is a PARP inhibitor (e.g., talazoparib, rucaparib, olaparib), a RAD51 inhibitor (e.g., RI-1), or an inhibitor of a DNA damage response kinase, e.g., CHCK1 (e.g., AZD7762), ATM (e.g., KU-55933, KU-60019, NU7026, or VE-821), and ATR (e.g., NU7026).

[0438] In some embodiments, the anti-cancer therapy comprises a radiosensitizer, e.g., alone or in combination with an ALK-targeted therapy. Exemplary radiosensitizers include hypoxia radiosensitizers such as misonidazole, metronidazole, and trans-sodium crocetinate, a compound that helps to increase the diffusion of oxygen into hypoxic tumor tissue. The radiosensitizer can also be a DNA damage response inhibitor interfering with base excision repair (BER), nucleotide excision repair (NER), mismatch repair (MMR), recombinational repair comprising homologous recombination (HR) and non-homologous end-joining (NHEJ), and direct repair mechanisms. Single strand break (SSB) repair mechanisms include BER, NER, or MMR pathways, while double stranded break (DSB) repair mechanisms consist of HR and NHEJ pathways. Radiation causes DNA breaks that, if not repaired, are lethal. SSBs are repaired through a combination of BER, NER and MMR mechanisms using the intact DNA strand as a template. The predominant pathway of SSB repair is BER, utilizing a family of related enzymes termed poly-(ADP-ribose) polymerases (PARP). Thus, the radiosensitizer can include DNA damage response inhibitors such as PARP inhibitors.

[0439] In some embodiments, the anti-cancer therapy comprises an anti-inflammatory agent, e.g., alone or in combination with an ALK-targeted therapy. In some embodiments, the anti-inflammatory agent is an agent that blocks, inhibits, or reduces inflammation or signaling from an inflammatory signaling pathway In some embodiments, the anti-inflammatory agent inhibits or reduces the activity of one or more of any of the following: IL-1, IL-2, IL-3, IL-4, IL-5, IL-6, IL-7, IL-8, IL-9, IL-10, IL-12, IL-13, IL-15, IL-18, IL-23; interferons (IFNs), e.g., IFNα, IFNβ, IFNγ, IFN-γ inducing factor (IGIF); transforming growth factor-β (TGF-β); transforming growth factor-α (TGF-α); tumor necrosis factors, e.g., TNF-α, TNF-β, TNF-RI, TNF-RII; CD23; CD30; CD40L; EGF; G-CSF; GDNF; PDGF-BB; RANTES/CCL5; IKK; NF-κB; TLR2; TLR3; TLR4; TL5; TLR6; TLR7; TLR8; TLR8; TLR9; and/or any cognate receptors thereof. In some embodiments, the anti-inflammatory agent is an IL-1 or IL-1 receptor antagonist, such as anakinra (e.g., Kineret®), rilonacept, or canakinumab. In some embodiments, the anti-inflammatory agent is an IL-6 or IL-6 receptor antagonist, e.g., an anti-IL-6 antibody or an anti-IL-6 receptor antibody, such as tocilizumab (e.g., ACTEMRA®), olokizumab, clazakizumab, sarilumab, sirukumab, siltuximab, or ALX-0061. In some embodiments, the anti-inflammatory agent is a TNF-α antagonist, e.g., an anti-TNFα antibody, such as infliximab (Remicade®), golimumab (Simponi®), adalimumab (e.g., Humira®), certolizumab pegol (e.g., Cimzia®) or etanercept. In some embodiments, the anti-inflammatory agent is a corticosteroid. Exemplary corticosteroids include, but are not limited to, cortisone (hydrocortisone, hydrocortisone sodium phosphate, hydrocortisone sodium succinate, e.g., Ala-Cort®, Hydrocort Acetate®, hydrocortone phosphate Lanacort®, Solu-Cortef®), decadron (dexamethasone, dexamethasone acetate, dexamethasone sodium phosphate, e.g., Dexasone®, Diodex®, Hexadrol®, Maxidex®), methylprednisolone (6-methylprednisolone, methylprednisolone acetate, methylprednisolone sodium succinate, e.g., Duralone®, Medralone®, Medrol®, M-Prednisol®, Solu-Medrol®), prednisolone (e.g., Delta-Cortef®, ORAPRED®, Pediapred®, Prezone®), and prednisone (e.g., Deltasone®, Liquid Pred®, Meticorten®, Orasone®), and bisphosphonates (e.g., pamidronate (Aredia®), and zoledronic acid (e.g., Zometac®).

[0440] In some embodiments, the anti-cancer therapy comprises an anti-hormonal agent, e.g., alone or in combination with an ALK-targeted therapy. Anti-hormonal agents are agents that act to regulate or inhibit hormone action on tumors. Examples of anti-hormonal agents include anti-estrogens and selective estrogen receptor modulators (SERMs), including, for example, tamoxifen (including NOLVADEX® tamoxifen), raloxifene, droloxifene, 4-hydroxytamoxifen, trioxifene, keoxifene, LY117018, onapristone, and FARESTON® toremifene; aromatase inhibitors that inhibit the enzyme aromatase, which regulates estrogen production in the adrenal glands, such as, for example, 4(5)-imidazoles, aminoglutethimide, MEGACE® megestrol acetate, AROMASIN® exemestane, formestanie, fadrozole, RIVISOR® vorozole, FEMARA® letrozole, and ARIMIDEX® (anastrozole); anti-androgens such as flutamide, nilutamide, bicalutamide, leuprolide, and goserelin; troxacitabine (a 1,3-dioxolane nucleoside cytosine analog); antisense oligonucleotides, particularly those that inhibit expression of genes in signaling pathways implicated in aberrant cell proliferation, such as, for example, PKC-alpha, Raf, H-Ras, and epidermal growth factor receptor (EGF-R); vaccines such as gene therapy vaccines, for example, ALLOVECTIN® vaccine, LEUVECTIN® vaccine, and VAXID® vaccine; PROLEUKIN® rIL-2; LURTOTECAN® topoisomerase 1 inhibitor; ABARELIX® rmRH; and pharmaceutically acceptable salts, acids or derivatives of any of the above.

[0441] In some embodiments, the anti-cancer therapy comprises an antimetabolite chemotherapeutic agent, e.g., alone or in combination with an ALK-targeted therapy. Antimetabolite chemotherapeutic agents are agents that are structurally similar to a metabolite, but cannot be used by the body in a productive manner. Many antimetabolite chemotherapeutic agents interfere with the production of RNA or DNA. Examples of antimetabolite chemotherapeutic agents include gemcitabine (e.g., GEMZAR®), 5-fluorouracil (5-FU), capecitabine (e.g., XELODA™), 6-mercaptopurine, methotrexate, 6-thioguanine, pemetrexed, raltitrexed, arabinosylcytosine ARA-C cytarabine (e.g., CYTOSAR-U®), dacarbazine (DTIC-DOMED), azocytosine, deoxycytosine, pyridmidene, fludarabine (e.g., FLUDARA®), cladrabine, and 2-deoxy-D-glucose. In some embodiments, an antimetabolite chemotherapeutic agent is gemcitabine. Gemcitabine HCl is sold by Eli Lilly under the trademark GEMZAR®.

[0442] In some embodiments, the anti-cancer therapy comprises a platinum-based chemotherapeutic agent, e.g., alone or in combination with an ALK-targeted therapy. Platinum-based chemotherapeutic agents are chemotherapeutic agents that comprise an organic compound containing platinum as an integral part of the molecule. In some embodiments, a chemotherapeutic agent is a platinum agent. In some such embodiments, the platinum agent is selected from cisplatin, carboplatin, oxaliplatin, nedaplatin, triplatin tetranitrate, phenanthriplatin, picoplatin, or satraplatin.

[0443] In some aspects, provided herein are therapeutic formulations comprising an anti-cancer therapy provided herein (e.g., an ALK-targeted therapy, and/or any other anti-cancer therapy provided herein), and a pharmaceutically acceptable carrier, excipient, or stabilizer. A formulation provided herein may contain more than one active compound, e.g., an anti-cancer therapy provided herein and one or more additional agents (e.g., anti-cancer agents).

[0444] Acceptable carriers, excipients, or stabilizers are non-toxic to recipients at the dosages and concentrations employed, and include, for example, one or more of: buffers such as phosphate, citrate, and other organic acids; antioxidants, including ascorbic acid and methionine; preservatives such as octadecyldimethylbenzyl ammonium chloride, hexamethonium chloride, benzalkonium chloride, benzethonium chloride, phenol, butyl or benzyl alcohol, alkyl parabens such as methyl or propyl paraben, catechol, resorcinol, cyclohexanol, 3-pentanol, or m-cresol; low molecular weight polypeptides (e.g., less than about 10 residues); proteins such as serum albumin, gelatin, or immunoglobulins; hydrophilic polymers such as polyvinylpyrrolidone; amino acids such as glycine, glutamine, asparagine, histidine, arginine, or lysine; monosaccharides, disaccharides, and other carbohydrates including glucose, mannose, or dextrins; chelating agents such as EDTA; sugars such as sucrose, mannitol, trehalose or sorbitol; salt-forming counter-ions such as sodium; metal complexes (e.g., Zn-protein complexes); surfactants such as non-ionic surfactants; or polymers such as polyethylene glycol (PEG).

[0445] The active ingredients may be entrapped in microcapsules. Such microcapsules may be prepared, for example, by coacervation techniques or by interfacial polymerization, for example, hydroxymethylcellulose or gelatin-microcapsules and poly-(methylmethacylate) microcapsules, respectively; in colloidal drug delivery systems (for example, liposomes, albumin microspheres, microemulsions, nano-particles and nano-capsules); or in macroemulsions. Such techniques are known in the art.

[0446] Sustained-release compositions may be prepared. Suitable examples of sustained-release compositions include semi-permeable matrices of solid hydrophobic polymers containing an anti-cancer therapy of the disclosure. Such matrices may be in the form of shaped articles, e.g., films, or microcapsules. Examples of sustained-release matrices include polyesters, hydrogels (for example, poly(2-hydroxyethyl-methacrylate), or poly(vinylalcohol)), polylactides, copolymers of L-glutamic acid and γ ethyl-L-glutamate, non-degradable ethylene-vinyl acetate, degradable lactic acid-glycolic acid copolymers such as the LUPRON DEPOT™ (injectable microspheres composed of lactic acid-glycolic acid copolymer and leuprolide acetate), and poly-D-(−)-3-hydroxybutyric acid.

[0447] A formulation provided herein may also contain more than one active compound, for example, those with complementary activities that do not adversely affect each other. The type and effective amounts of such medicaments depend, for example, on the amount and type of active compound(s) present in the formulation, and clinical parameters of the subjects.

[0448] For general information concerning formulations, see, e.g., Gilman et al. (eds.) The Pharmacological Bases of Therapeutics, 8th Ed., Pergamon Press, 1990; A. Gennaro (ed.), Remington's Pharmaceutical Sciences, 18th Edition, Mack Publishing Co., Pennsylvania, 1990; Avis et al. (eds.) Pharmaceutical Dosage Forms: Parenteral Medications Dekker, New York, 1993; Lieberman et al. (eds.) Pharmaceutical Dosage Forms: Tablets Dekker, New York, 1990; Lieberman et al. (eds.), Pharmaceutical Dosage Forms: Disperse Systems Dekker, New York, 1990; and Walters (ed.) Dermatological and Transdermal Formulations (Drugs and the Pharmaceutical Sciences), Vol 1 19, Marcel Dekker, 2002.

[0449] Formulations to be used for in vivo administration are sterile. This is readily accomplished by filtration through sterile filtration membranes or other methods known in the art.

[0450] In some embodiments, an anti-cancer therapy of the disclosure (e.g., an ALK-targeted therapy) is administered as a monotherapy. In some embodiments, the anti-cancer therapy is administered in combination with one or more additional anti-cancer therapies or treatments, e.g., as described herein. In some embodiments, the one or more additional anti-cancer therapies or treatments include one or more anti-cancer therapies described herein. In some embodiments, the methods of the present disclosure comprise administration of any combination of any of the anti-cancer therapies provided herein. In some embodiments, the additional anti-cancer therapy comprises one or more of surgery, radiotherapy, chemotherapy, anti-angiogenic therapy, anti-DNA repair therapy, and anti-inflammatory therapy. In some embodiments, the additional anti-cancer therapy comprises an anti-neoplastic agent, a chemotherapeutic agent, a growth inhibitory agent, an anti-angiogenic agent, a radiation therapy, a cytotoxic agent, or combinations thereof. In some embodiments, an anti-cancer therapy may be administered in conjunction with a chemotherapy or chemotherapeutic agent. In some embodiments, the chemotherapy or chemotherapeutic agent is a platinum-based agent (including, without limitation cisplatin, carboplatin, oxaliplatin, and staraplatin). In some embodiments, an anti-cancer therapy may be administered in conjunction with a radiation therapy. In some embodiments, the anti-cancer therapy for use in any of the methods described herein (e.g., as monotherapy or in combination with another therapy or treatment) is an anti-cancer therapy or treatment described by Pietrantonio et al., J Natl Cancer Inst (2017) 109(12) and/or by Wang et al., Cancers (2020) 12(2):426, which are hereby incorporated by reference.

### D. Reporting

[0451] In some embodiments, the methods provided herein comprise generating a report, and/or providing a report to party.

[0452] In some embodiments, a report according to the present disclosure comprises information about one or more of: an ALK fusion nucleic acid molecule or polypeptide of the disclosure (e.g., an ALK-ABCB11, ALK-ACTN4, ALK-AGAP1, ALK-APH1A, ALK-AZI2, ALK-BTBD9, ALK-C2orf73, ALK-CAPN14, ALK-CARMIL1, ALK-CASP8, ALK-CDC42BPA, ALK-CIB4, ALK-CNTNAP5, ALK-COL3A1, ALK-CPQ, ALK-CPSF7, ALK-CREBBP, ALK-CTBP1, ALK-CTNND1, ALK-CYP51A1, ALK-CYS1, ALK-EPHA2, ALK-FHOD3, ALK-FILIP1L, ALK-GMCL1, ALK-GPN1, ALK-GPR113, ALK-HADHA, ALK-HS1BP3, ALK-INTS9, ALK-ITGA6, ALK-KCTD18, ALK-KIF5C, ALK-KLC4, ALK-LINC00535, ALK-LRRFIP2, ALK-MAGOHB, ALK-MAMDC4, ALK-MANBA, ALK-MAP3K9, ALK-MED13L, ALK-METTL25, ALK-MTBP, ALK-MYH10, ALK-MYO5C, ALK-NFIA, ALK-NINJ2, ALK-OPRM1, ALK-OTX1, ALK-PAQR4, ALK-PDCD10, ALK-PDE3A, ALK-PELI1, ALK-PLEC, ALK-PTGER4, ALK-PTPRJ, ALK-QKI, ALK-RPS6KA5, ALK-SASH1, ALK-SEC16B, ALK-SKAP1, ALK-SLC25A13, ALK-SLC30A6, ALK-SNX17, ALK-SOX13, ALK-SRSF7, ALK-TANGO6, ALK-TG, ALK-TMCO3, ALK-TNS3, ALK-TRIM24, ALK-TTC28, ALK-UBE2L3, ALK-UBE3B, ALK-UTRN, ALK-VASP, ALK-WDR92, ALK-YPEL5, ALK-ZNF446, ALK-ZNF454, ALK-ZNF513, or ALK-ZSWIM2 fusion nucleic acid molecule or polypeptide described herein); a cancer of the disclosure, e.g., comprising an ALK fusion nucleic acid molecule or polypeptide of the disclosure; or a treatment, a therapy, or one or more treatment options for an individual having a cancer, such as a cancer of the disclosure (e.g., comprising an ALK fusion nucleic acid molecule or polypeptide described herein).

[0453] In some embodiments, a report according to the present disclosure comprises information about the presence or absence of an ALK fusion nucleic acid molecule or polypeptide of the disclosure in a sample obtained from an individual, such as an individual having a cancer, e.g., a cancer provided herein. In one embodiment, a report according to the present disclosure indicates that an ALK fusion nucleic acid molecule or polypeptide of the disclosure is present in a sample obtained from the individual. In one embodiment, a report according to the present disclosure indicates that an ALK fusion nucleic acid molecule or polypeptide of the disclosure is not present in a sample obtained from the individual. In one embodiment, a report according to the present disclosure indicates that an ALK fusion nucleic acid molecule or polypeptide of the disclosure has been detected in a sample obtained from the individual. In one embodiment, a report according to the present disclosure indicates that an ALK fusion nucleic acid molecule or polypeptide of the disclosure has not been detected in a sample obtained from the individual. In some embodiments, the report comprises an identifier for the individual from which the sample was obtained.

[0454] In some embodiments, the report includes information on the role of an ALK fusion nucleic acid molecule or polypeptide of the disclosure in disease, such as in cancer. Such information can include one or more of: information on prognosis of a cancer, such as a cancer provided herein, e.g., comprising an ALK fusion nucleic acid molecule or polypeptide described herein; information on resistance of a cancer, such as a cancer provided herein, e.g., comprising an ALK fusion nucleic acid molecule or polypeptide described herein, to one or more treatments; information on potential or suggested therapeutic options (e.g., such as an anti-cancer therapy provided herein, or a treatment selected or identified according to the methods provided herein); or information on therapeutic options that should be avoided. In some embodiments, the report includes information on the likely effectiveness, acceptability, and/or advisability of applying a therapeutic option (e.g., such as an anti-cancer therapy provided herein, or a treatment selected or identified according to the methods provided herein) to an individual having a cancer, such as a cancer provided herein, e.g., comprising an ALK fusion nucleic acid molecule or polypeptide described herein and identified in the report. In some embodiments, the report includes information or a recommendation on the administration of a treatment (e.g., an anti-cancer therapy provided herein, or a treatment selected or identified according to the methods provided herein). In some embodiments, the information or recommendation includes the dosage of the treatment and/or a treatment regimen (e.g., in combination with other treatments, such as a second therapeutic agent). In some embodiments, the report comprises information or a recommendation for at least one, at least two, at least three, at least four, at least five, at least six, at least seven, at least eight, at least nine, at least ten, or more treatments.

[0455] Also provided herein are methods of generating a report according to the present disclosure. In some embodiments, a report according to the present disclosure is generated by a method comprising one or more of the following steps: obtaining a sample, such as a sample described herein, from an individual, e.g., an individual having a cancer, such as a cancer provided herein; detecting an ALK fusion nucleic acid molecule or polypeptide of the disclosure in the sample, or acquiring knowledge of the presence of the ALK fusion nucleic acid molecule or polypeptide of the disclosure in the sample; and generating a report. In some embodiments, a report generated according to the methods provided herein comprises one or more of: information about the presence or absence of an ALK fusion nucleic acid molecule or polypeptide of the disclosure in the sample; an identifier for the individual from which the sample was obtained; information on the role of the ALK fusion nucleic acid molecule or polypeptide of the disclosure, or its wild type counterparts, in disease (e.g., such as in cancer); information on prognosis, resistance, or potential or suggested therapeutic options (such as an anti-cancer therapy provided herein, or a treatment selected or identified according to the methods provided herein); information on the likely effectiveness, acceptability, or the advisability of applying a therapeutic option (such as an anti-cancer therapy provided herein, or a treatment selected or identified according to the methods provided herein) to the individual; a recommendation or information on the administration of a treatment (such as an anti-cancer therapy provided herein, or a treatment selected or identified according to the methods provided herein); or a recommendation or information on the dosage or treatment regimen of a treatment (such as an anti-cancer therapy provided herein, or a treatment selected or identified according to the methods provided herein), e.g., in combination with other treatments (e.g., a second therapeutic agent). In some embodiments, the report generated is a personalized cancer report.

[0456] A report according to the present disclosure may be in an electronic, web-based, or paper form. The report may be provided to an individual or a patient (e.g., an individual or a patient having, suspected of having, or being tested for a cancer, such as a cancer provided herein, e.g., comprising an ALK fusion nucleic acid molecule or polypeptide of the disclosure), or to an individual or entity other than the individual or patient, such as one or more of a caregiver, a physician, an oncologist, a hospital, a clinic, a third party payor, an insurance company, or a government entity. In some embodiments, the report is provided or delivered to the individual or entity within any of about 1 day or more, about 7 days or more, about 14 days or more, about 21 days or more, about 30 days or more, about 45 days or more, or about 60 days or more from obtaining a sample from the individual. In some embodiments, the report is provided or delivered to an individual or entity within any of about 1 day or more, about 7 days or more, about 14 days or more, about 21 days or more, about 30 days or more, about 45 days or more, or about 60 days or more from detecting an ALK fusion nucleic acid molecule or polypeptide of the disclosure in a sample obtained from the individual. In some embodiments, the report is provided or delivered to an individual or entity within any of about 1 day or more, about 7 days or more, about 14 days or more, about 21 days or more, about 30 days or more, about 45 days or more, or about 60 days or more from acquiring knowledge of the presence of an ALK fusion nucleic acid molecule or polypeptide of the disclosure in a sample obtained from the individual.

### E. Software, Systems, and Devices

[0457] In some other aspects, provided herein are non-transitory computer-readable storage media. In some embodiments, the non-transitory computer-readable storage media comprise one or more programs for execution by one or more processors of a device, the one or more programs including instructions which, when executed by the one or more processors, cause the device to perform the method according to any of the embodiments described herein.

[0458] FIG. 1 illustrates an example of a computing device or system in accordance with one embodiment. Device 900 can be a host computer connected to a network. Device 900 can be a client computer or a server. As shown in FIG. 1, device 900 can be any suitable type of microprocessor-based device, such as a personal computer, workstation, server or handheld computing device (portable electronic device) such as a phone or tablet. The device can include, for example, one or more processor(s) 910, input devices 920, output devices 930, memory or storage devices 940, communication devices 960, and nucleic acid sequencers 970. Software 950 residing in memory or storage device 940 may comprise, e.g., an operating system as well as software for executing the methods described herein, e.g., for detecting an ALK fusion nucleic acid molecule of the disclosure. Input device 920 and output device 930 can generally correspond to those described herein, and can either be connectable or integrated with the computer.

[0459] Input device 920 can be any suitable device that provides input, such as a touch screen, keyboard or keypad, mouse, or voice-recognition device. Output device 930 can be any suitable device that provides output, such as a touch screen, haptics device, or speaker.

[0460] Storage 940 can be any suitable device that provides storage (e.g., an electrical, magnetic or optical memory including a RAM (volatile and non-volatile), cache, hard drive, or removable storage disk). Communication device 960 can include any suitable device capable of transmitting and receiving signals over a network, such as a network interface chip or device. The components of the computer can be connected in any suitable manner, such as via a wired media (e.g., a physical system bus 980, Ethernet connection, or any other wire transfer technology) or wirelessly (e.g., Bluetooth®, Wi-Fi®, or any other wireless technology).

[0461] Software module 950, which can be stored as executable instructions in storage 940 and executed by processor(s) 910, can include, for example, an operating system and/or the processes that embody the functionality of the methods of the present disclosure, e.g., for detecting an ALK fusion nucleic acid molecule of the disclosure (e.g., as embodied in the devices as described herein).

[0462] Software module 950 can also be stored and/or transported within any non-transitory computer-readable storage medium for use by or in connection with an instruction execution system, apparatus, or device, such as those described herein, that can fetch instructions associated with the software from the instruction execution system, apparatus, or device and execute the instructions. In the context of this disclosure, a computer-readable storage medium can be any medium, such as storage 940, that can contain or store processes for use by or in connection with an instruction execution system, apparatus, or device. Examples of computer-readable storage media may include memory units like hard drives, flash drives and distribute modules that operate as a single functional unit. Also, various processes described herein may be embodied as modules configured to operate in accordance with the embodiments and techniques described above. Further, while processes may be shown and/or described separately, those skilled in the art will appreciate that the above processes may be routines or modules within other processes.

[0463] Software module 950 can also be propagated within any transport medium for use by or in connection with an instruction execution system, apparatus, or device, such as those described above, that can fetch instructions associated with the software from the instruction execution system, apparatus, or device and execute the instructions. In the context of this disclosure, a transport medium can be any medium that can communicate, propagate or transport programming for use by or in connection with an instruction execution system, apparatus, or device. The transport readable medium can include, but is not limited to, an electronic, magnetic, optical, electromagnetic or infrared wired or wireless propagation medium.

[0464] Device 900 may be connected to a network (e.g., network 1004, as shown in FIG. 2 and described below), which can be any suitable type of interconnected communication system. The network can implement any suitable communications protocol and can be secured by any suitable security protocol. The network can comprise network links of any suitable arrangement that can implement the transmission and reception of network signals, such as wireless network connections, T1 or T3 lines, cable networks, DSL, or telephone lines.

[0465] Device 900 can be implemented using any operating system, e.g., an operating system suitable for operating on the network. Software module 950 can be written in any suitable programming language, such as C, C++, Java or Python. In various embodiments, application software embodying the functionality of the present disclosure can be deployed in different configurations, such as in a client/server arrangement or through a Web browser as a Web-based application or Web service, for example. In some embodiments, the operating system is executed by one or more processors, e.g., processor(s) 910.

[0466] Device 900 can further include a sequencer 970, which can be any suitable nucleic acid sequencing instrument. Exemplary sequencers can include, without limitation, Roche/454's Genome Sequencer (GS) FLX System, Illumina/Solexa's Genome Analyzer (GA), Illumina's HiSeq 2500, HiSeq 3000, HiSeq 4000 and NovaSeq 6000 Sequencing Systems, Life/APG's Support Oligonucleotide Ligation Detection (SOLiD) system, Polonator's G.007 system, Helicos BioSciences' HeliScope Gene Sequencing system, or Pacific Biosciences' PacBio RS system.

[0467] FIG. 2 illustrates an example of a computing system in accordance with one embodiment. In computing system 1000, device 900 (e.g., as described above and illustrated in FIG. 1) is connected to network 1004, which is also connected to device 1006. In some embodiments, device 1006 is a sequencer. Exemplary sequencers can include, without limitation, Roche/454's Genome Sequencer (GS) FLX System, Illumina/Solexa's Genome Analyzer (GA), Illumina's HiSeq 2500, HiSeq 3000, HiSeq 4000 and NovaSeq 6000 Sequencing Systems, Life/APG's Support Oligonucleotide Ligation Detection (SOLiD) system, Polonator's G.007 system, Helicos BioSciences' HeliScope Gene Sequencing system, or Pacific Biosciences' PacBio RS system.

[0468] Devices 900 and 1006 may communicate, e.g., using suitable communication interfaces via network 1004, such as a Local Area Network (LAN), Virtual Private Network (VPN), or the Internet. In some embodiments, network 1004 can be, for example, the Internet, an intranet, a virtual private network, a cloud network, a wired network, or a wireless network. Devices 900 and 1006 may communicate, in part or in whole, via wireless or hardwired communications, such as Ethernet, IEEE 802.11b wireless, or the like. Additionally, devices 900 and 1006 may communicate, e.g., using suitable communication interfaces, via a second network, such as a mobile/cellular network. Communication between devices 900 and 1006 may further include or communicate with various servers such as a mail server, mobile server, media server, telephone server, and the like. In some embodiments, devices 900 and 1006 can communicate directly (instead of, or in addition to, communicating via network 1004), e.g., via wireless or hardwired communications, such as Ethernet, IEEE 802.11b wireless, or the like. In some embodiments, devices 900 and 1006 communicate via communications 1008, which can be a direct connection or can occur via a network (e.g., network 1004).

[0469] One or all of devices 900 and 1006 generally include logic (e.g., http web server logic) or are programmed to format data, accessed from local or remote databases or other sources of data and content, for providing and/or receiving information via network 1004 according to various examples described herein.

[0470] FIG. 3 illustrates an exemplary process 1200 for detecting an ALK fusion nucleic acid molecule of the disclosure in a sample, in accordance with some embodiments of the present disclosure. Process 1200 is performed, for example, using one or more electronic devices implementing a software program. In some examples, process 1200 is performed using a client-server system, and the blocks of process 1200 are divided up in any manner between the server and a client device. In other examples, the blocks of process 1200 are divided up between the server and multiple client devices. Thus, while portions of process 1200 are described herein as being performed by particular devices of a client-server system, it will be appreciated that process 1200 is not so limited. In some embodiments, the executed steps can be executed across many systems, e.g., in a cloud environment. In other examples, process 1200 is performed using only a client device or only multiple client devices. In process 1200, some blocks are, optionally, combined, the order of some blocks is, optionally, changed, and some blocks are, optionally, omitted. In some examples, additional steps may be performed in combination with the process 1200. Accordingly, the operations as illustrated (and described in greater detail below) are exemplary by nature and, as such, should not be viewed as limiting.

[0471] At block 1202, a plurality of sequence reads of one or more nucleic acid molecules is obtained, wherein the one or more nucleic acid molecules are derived from a sample obtained from an individual, e.g., as described herein. In some embodiments, the sample is obtained from an individual having, suspected of having, or being tested for a cancer, such as a cancer described herein. In some embodiments, the sequence reads are obtained using a sequencer, e.g., as described herein or otherwise known in the art. In some embodiments, the nucleic acid molecules comprise one or more nucleic acid molecules corresponding to: an ALK fusion nucleic acid molecule of the disclosure (e.g., an ALK-ABCB11, ALK-ACTN4, ALK-AGAP1, ALK-APH1A, ALK-AZI2, ALK-BTBD9, ALK-C2orf73, ALK-CAPN14, ALK-CARMIL1, ALK-CASP8, ALK-CDC42BPA, ALK-CIB4, ALK-CNTNAP5, ALK-COL3A1, ALK-CPQ, ALK-CPSF7, ALK-CREBBP, ALK-CTBP1, ALK-CTNND1, ALK-CYP51A1, ALK-CYS1, ALK-EPHA2, ALK-FHOD3, ALK-FILIP1L, ALK-GMCL1, ALK-GPN1, ALK-GPR113, ALK-HADHA, ALK-HS1BP3, ALK-INTS9, ALK-ITGA6, ALK-KCTD18, ALK-KIF5C, ALK-KLC4, ALK-LINC00535, ALK-LRRFIP2, ALK-MAGOHB, ALK-MAMDC4, ALK-MANBA, ALK-MAP3K9, ALK-MED13L, ALK-METTL25, ALK-MTBP, ALK-MYH10, ALK-MYO5C, ALK-NFIA, ALK-NINJ2, ALK-OPRM1, ALK-OTX1, ALK-PAQR4, ALK-PDCD10, ALK-PDE3A, ALK-PELI1, ALK-PLEC, ALK-PTGER4, ALK-PTPRJ, ALK-QKI, ALK-RPS6KA5, ALK-SASH1, ALK-SEC16B, ALK-SKAP1, ALK-SLC25A13, ALK-SLC30A6, ALK-SNX17, ALK-SOX13, ALK-SRSF7, ALK-TANGO6, ALK-TG, ALK-TMCO3, ALK-TNS3, ALK-TRIM24, ALK-TTC28, ALK-UBE2L3, ALK-UBE3B, ALK-UTRN, ALK-VASP, ALK-WDR92, ALK-YPEL5, ALK-ZNF446, ALK-ZNF454, ALK-ZNF513, or ALK-ZSWIM2 fusion nucleic acid molecule described herein); or a gene involved in an ALK fusion nucleic acid molecule of the disclosure; or fragments thereof. Optionally, prior to obtaining the sequence reads, the sample is purified, enriched (e.g., for nucleic acid(s) corresponding to: an ALK fusion nucleic acid molecule of the disclosure; or a gene involved in an ALK fusion nucleic acid molecule of the disclosure; or fragments thereof), and/or subjected to PCR amplification. At block 1204, an exemplary system (e.g., one or more electronic devices) analyzes the plurality of sequence reads for the presence of an ALK fusion nucleic acid molecule of the disclosure, or a fragment thereof. At block 1206, the system detects (e.g., based on the analysis) an ALK fusion nucleic acid molecule of the disclosure, or a fragment thereof, in the sample.

[0472] In some embodiments of any of the methods, systems, devices, non-transitory computer readable storage media, or processes of the disclosure, the ALK fusion nucleic acid molecule is any of the ALK fusion nucleic acid molecules provides herein. In some embodiments of any of the methods, systems, devices, non-transitory computer readable storage media, or processes of the disclosure, the ALK fusion nucleic acid molecule comprises a fusion between an ALK gene, or a portion thereof, and a gene listed in Table 1, or a portion thereof. In some embodiments of any of the methods, systems, devices, non-transitory computer readable storage media, or processes of the disclosure, the ALK fusion nucleic acid molecule is an ALK fusion nucleic acid molecule listed in Table 2, and wherein the order of the genes in the fusion in the 5′ to 3′ direction is as listed in Table 2. In some embodiments of any of the methods, systems, devices, non-transitory computer readable storage media, or processes of the disclosure, the ALK fusion nucleic acid molecule is an ALK fusion nucleic acid molecule listed in Table 3, and wherein the ALK fusion nucleic acid molecule comprises or results from a corresponding 5′ breakpoint and/or 3′ breakpoint within the exons or introns as listed in Table 3. In some embodiments of any of the methods, systems, devices, non-transitory computer readable storage media, or processes of the disclosure, the ALK fusion nucleic acid molecule is an ALK fusion nucleic acid molecule listed in Table 4, and wherein the ALK fusion nucleic acid molecule comprises or results from a corresponding 5′ breakpoint within the chromosomal coordinates as listed in Table 4, and/or a corresponding 3′ breakpoint within the chromosomal coordinates as listed in Table 4. In some embodiments of any of the methods, systems, devices, non-transitory computer readable storage media, or processes of the disclosure, the ALK fusion nucleic acid molecule is an ALK fusion nucleic acid molecule listed in Table 5, and wherein the ALK fusion nucleic acid molecule comprises or results from a fusion of a corresponding 5′ exon as listed in Table 5, or a portion thereof, fused to a corresponding 3′ exon as listed in Table 5, or a portion thereof. In some embodiments of any of the methods, systems, devices, non-transitory computer readable storage media, or processes of the disclosure, the ALK fusion nucleic acid molecule is an ALK fusion nucleic acid molecule listed in Table 6, and wherein the ALK fusion nucleic acid molecule comprises, in the 5′ to 3′ direction, the corresponding exons or portions thereof as listed in Table 6. In some embodiments of any of the methods, systems, devices, non-transitory computer readable storage media, or processes of the disclosure, the ALK fusion nucleic acid molecule is an ALK fusion nucleic acid molecule listed in Table 7, and wherein the ALK fusion nucleic acid molecule comprises a corresponding nucleotide sequence as listed in Table 7, or a nucleotide sequence with at least about 70% homology thereto. In some embodiments of any of the methods, systems, devices, non-transitory computer readable storage media, or processes of the disclosure, the ALK fusion nucleic acid molecule encodes an ALK fusion polypeptide. In some embodiments of any of the methods, systems, devices, non-transitory computer readable storage media, or processes of the disclosure, the ALK fusion nucleic acid molecule comprises a nucleotide sequence encoding an ALK fusion polypeptide that comprises an amino acid sequence as listed in Table 8, or an amino acid sequence with at least about 70% homology thereto. In some embodiments of any of the methods, systems, devices, non-transitory computer readable storage media, or processes of the disclosure, the encoded ALK fusion polypeptide comprises an ALK kinase domain, or a fragment of an ALK kinase domain, having ALK kinase activity. In some embodiments of any of the methods, systems, devices, non-transitory computer readable storage media, or processes of the disclosure, the encoded ALK fusion polypeptide has ALK kinase activity. In some embodiments of any of the methods, systems, devices, non-transitory computer readable storage media, or processes of the disclosure, the encoded ALK fusion polypeptide has a constitutive ALK kinase activity. In some embodiments of any of the methods, systems, devices, non-transitory computer readable storage media, or processes of the disclosure, the encoded ALK fusion polypeptide is oncogenic. In some embodiments of any of the methods, systems, devices, non-transitory computer readable storage media, or processes of the disclosure, the encoded ALK fusion polypeptide promotes cancer cell survival, angiogenesis, cancer cell proliferation, and any combination thereof. In some embodiments of any of the methods, systems, devices, non-transitory computer readable storage media, or processes of the disclosure, the encoded ALK fusion polypeptide is capable of dimerizing with an ALK polypeptide or with another ALK fusion polypeptide in a cancer cell. In some embodiments of any of the methods, systems, devices, non-transitory computer readable storage media, or processes of the disclosure, the encoded ALK fusion polypeptide is an ALK fusion polypeptide listed in Table 8, and wherein the encoded ALK fusion polypeptide comprises a corresponding amino acid sequence as listed in Table 8, or an amino acid sequence with at least about 70% homology thereto.

[0473] In some embodiments of any of the methods, systems, devices, non-transitory computer readable storage media, or processes of the disclosure, the cancer is a carcinoma, a sarcoma, a lymphoma, a leukemia, a myeloma, a germ cell cancer, or a blastoma. In some embodiments of any of the methods, systems, devices, non-transitory computer readable storage media, or processes of the disclosure, the cancer is a solid tumor or a hematologic malignancy. In some embodiments of any of the methods, systems, devices, non-transitory computer readable storage media, or processes of the disclosure, the cancer is a lymphoma. In some embodiments of any of the methods, systems, devices, non-transitory computer readable storage media, or processes of the disclosure, the cancer is a non-small cell lung carcinoma, a leiomyosarcoma, a thyroid carcinoma, a colorectal cancer, a pancreatic cancer, or a malignant peritoneal mesothelioma. In some embodiments of any of the methods, systems, devices, non-transitory computer readable storage media, or processes of the disclosure, the cancer is a B cell cancer, a melanoma, breast cancer, lung cancer, bronchus cancer, colorectal cancer, prostate cancer, pancreatic cancer, stomach cancer, ovarian cancer, urinary bladder cancer, brain cancer, central nervous system cancer, peripheral nervous system cancer, esophageal cancer, cervical cancer, uterine cancer, endometrial cancer, cancer of an oral cavity, cancer of a pharynx, liver cancer, kidney cancer, testicular cancer, biliary tract cancer, small bowel cancer, appendix cancer, salivary gland cancer, thyroid gland cancer, adrenal gland cancer, osteosarcoma, chondrosarcoma, a cancer of hematological tissue, an adenocarcinoma, an inflammatory myofibroblastic tumor, a gastrointestinal stromal tumor (GIST), colon cancer, multiple myeloma (MM), myelodysplastic syndrome (MDS), myeloproliferative disorder (MPD), acute lymphocytic leukemia (ALL), acute myelocytic leukemia (AML), chronic myelocytic leukemia (CML), chronic lymphocytic leukemia (CLL), polycythemia Vera, Hodgkin lymphoma, non-Hodgkin lymphoma (NHL), soft-tissue sarcoma, fibrosarcoma, myxosarcoma, liposarcoma, osteogenic sarcoma, chordoma, angiosarcoma, endotheliosarcoma, lymphangiosarcoma, lymphangioendotheliosarcoma, synovioma, mesothelioma, Ewing's tumor, leiomyosarcoma, rhabdomyosarcoma, squamous cell carcinoma, basal cell carcinoma, adenocarcinoma, sweat gland carcinoma, sebaceous gland carcinoma, papillary carcinoma, papillary adenocarcinomas, medullary carcinoma, bronchogenic carcinoma, renal cell carcinoma, hepatoma, bile duct carcinoma, choriocarcinoma, seminoma, embryonal carcinoma, Wilms' tumor, bladder carcinoma, epithelial carcinoma, glioma, astrocytoma, medulloblastoma, craniopharyngioma, ependymoma, pinealoma, hemangioblastoma, acoustic neuroma, oligodendroglioma, meningioma, neuroblastoma, retinoblastoma, follicular lymphoma, diffuse large B-cell lymphoma, mantle cell lymphoma, hepatocellular carcinoma, thyroid cancer, gastric cancer, head and neck cancer, small cell cancer, essential thrombocythemia, agnogenic myeloid metaplasia, hypereosinophilic syndrome, systemic mastocytosis, familiar hypereosinophilia, chronic eosinophilic leukemia, neuroendocrine cancers, or a carcinoid tumor. In some embodiments of any of the methods, systems, devices, non-transitory computer readable storage media, or processes of the disclosure, the cancer is an anus squamous cell carcinoma, brain glioblastoma (GBM), breast cancer, breast carcinoma, breast invasive ductal carcinoma (IDC), colon adenocarcinoma (CRC), esophagus adenocarcinoma, fallopian tube serous carcinoma, gallbladder adenocarcinoma, gallbladder carcinoma, gastroesophageal junction adenocarcinoma, lung adenocarcinoma, lung non-small cell lung carcinoma, lung non-small cell lung carcinoma, lymph node Castleman's disease, lymph node lymphoma T-cell, ovary clear cell carcinoma, ovary endometrioid adenocarcinoma, ovary epithelial carcinoma, ovary high grade serous carcinoma, ovary serous carcinoma, pancreas cancer, pancreas ductal adenocarcinoma, pediatric bone osteosarcoma, bone osteosarcoma, pediatric skin melanoma, skin melanoma, pediatric soft tissue sarcoma, soft tissue sarcoma, pediatric soft tissue sarcoma undifferentiated, soft tissue sarcoma undifferentiated, peritoneum serous carcinoma, prostate acinar adenocarcinoma, small intestine adenocarcinoma, soft tissue leiomyosarcoma, soft tissue liposarcoma, thyroid papillary carcinoma, unknown primary adenocarcinoma, unknown primary carcinoma, unknown primary malignant neoplasm, unknown primary myoepithelial carcinoma, uterus carcinosarcoma, uterus endometrial adenocarcinoma endometrioid, uterus leiomyosarcoma, or vulva squamous cell carcinoma (SCC). In some embodiments of any of the methods, systems, devices, non-transitory computer readable storage media, or processes of the disclosure, the ALK fusion nucleic acid molecule is an ALK fusion nucleic acid molecule listed in Table 9, or the encoded ALK fusion polypeptide is an ALK fusion polypeptide listed in Table 9, and wherein the cancer is the corresponding cancer as listed in Table 9.

[0474] In some embodiments of any of the methods, systems, devices, non-transitory computer readable storage media, or processes of the disclosure, the plurality of sequence reads is obtained by sequencing nucleic acids obtained from any of the samples described herein, e.g., tissue and/or liquid biopsies, etc. In some embodiments, the sample is obtained from the cancer. In some embodiments, the sample comprises a tissue biopsy sample, a liquid biopsy sample, or a normal control. In some embodiments, the sample is from a tumor biopsy, tumor specimen, or circulating tumor cell. In some embodiments, the sample is a liquid biopsy sample and comprises blood, plasma, cerebrospinal fluid, sputum, stool, urine, or saliva. In some embodiments, the sample comprises cells and/or nucleic acids from the cancer. In some embodiments, the sample comprises mRNA, DNA, circulating tumor DNA (ctDNA), cell-free DNA, or cell-free RNA from the cancer. In some embodiments, the sample is a liquid biopsy sample and comprises circulating tumor cells (CTCs). In some embodiments, the sample is a liquid biopsy sample and comprises cell-free DNA (cfDNA), circulating tumor DNA (ctDNA), or any combination thereof.

[0475] In some embodiments of any of the methods, systems, devices, non-transitory computer readable storage media, or processes of the disclosure, the plurality of sequence reads is obtained by sequencing. In some embodiments, the sequencing comprises use of a massively parallel sequencing (MPS) technique, whole genome sequencing (WGS), whole exome sequencing, targeted sequencing, direct sequencing, or a Sanger sequencing technique. In some embodiments, the massively parallel sequencing technique comprises next generation sequencing (NGS).

[0476] In some embodiments of any of the methods, systems, devices, non-transitory computer readable storage media, or processes of the disclosure, the disclosed methods for determining the presence or absence of a fusion nucleic acid molecule of the disclosure may be implemented as part of a genomic profiling process that comprises identification of the presence of variant sequences at one or more gene loci in a sample derived from an individual as part of detecting, monitoring, predicting a risk factor, or selecting a treatment for a particular disease, e.g., cancer. In some instances, the variant panel selected for genomic profiling may comprise the detection of variant sequences at a selected set of gene loci. In some instances, the variant panel selected for genomic profiling may comprise detection of variant sequences at a number of gene loci through comprehensive genomic profiling (CGP), a next-generation sequencing (NGS) approach used to assess hundreds of genes (including relevant cancer biomarkers) in a single assay. Inclusion of the disclosed methods for determining the presence or absence of an ALK fusion nucleic acid molecule of the disclosure as part of a genomic profiling process can improve the validity of, e.g., disease detection calls, made on the basis of the molecular profile by, for example, independently confirming the presence of the ALK fusion nucleic acid molecule of the disclosure in a given patient sample.

[0477] In some instances, a molecular profile may comprise information on the presence of genes (or variant sequences thereof), copy number variations, epigenetic traits, proteins (or modifications thereof), and/or other biomarkers in an individual's genome and/or proteome, as well as information on the individual's corresponding phenotypic traits and the interaction between genetic or genomic traits, phenotypic traits, and environmental factors.

[0478] In some instances, a molecular profile for the individual may comprise results from a comprehensive genomic profiling (CGP) test, a nucleic acid sequencing-based test, a gene expression profiling test, a cancer hotspot panel test, a DNA methylation test, a DNA fragmentation test, an RNA fragmentation test, or any combination thereof.

[0479] Accordingly, in some embodiments of any of the methods, systems, devices, non-transitory computer readable storage media, or processes of the disclosure, a molecular profile for the sample or for the individual is generated based, at least in part, on detecting an ALK fusion nucleic acid molecule of the disclosure, or a fragment thereof, in the sample. In some embodiments, the individual is administered a treatment based at least in part on the molecular profile, e.g., a treatment described herein such as an ALK-targeted therapy. In some embodiments, the molecular profile further comprises results from a comprehensive genomic profiling (CGP) test, a gene expression profiling test, a cancer hotspot panel test, a DNA methylation test, a DNA fragmentation test, an RNA fragmentation test, or any combination thereof. In some embodiments, the molecular profile further comprises results from a nucleic acid sequencing-based test. In some embodiments, the molecular profile further comprises/indicates/comprises information on presence or absence of mutations in one or more additional genes, e.g., a panel of known/suspected oncogenes and/or tumor suppressors. In some embodiments, the molecular profile is obtained from a genomic profiling assay (such as a cancer- or tumor-related genomic profiling assay), e.g., as obtained using any of the sequencing methodologies described herein. In some embodiments, the molecular profile includes information from whole-genome or whole-exome sequencing. In some embodiments, the molecular profile includes information from targeted sequencing. In some embodiments, the molecular profile includes information from NGS. In some embodiments, the molecular profile comprises/indicates/comprises information on presence or absence of mutations such as short variant alterations (e.g., a base substitution, insertion, or deletion), copy-number alterations (e.g., an amplification or a homozygous deletion), and/or rearrangements (e.g., a gene fusion or other genomic or chromosomal rearrangement) of one or more genes, e.g., a panel of known/suspected oncogenes and/or tumor suppressors.

[0480] The method steps of the methods described herein are intended to include any suitable method of causing one or more other parties or entities to perform the steps, unless a different meaning is expressly provided or otherwise clear from the context. Such parties or entities need not be under the direction or control of any other party or entity, and need not be located within a particular jurisdiction. Thus, for example, a description or recitation of “adding a first number to a second number” includes causing one or more parties or entities to add the two numbers together. For example, if person X engages in an arm's length transaction with person Y to add the two numbers, and person Y indeed adds the two numbers, then both persons X and Y perform the step as recited: person Y by virtue of the fact that he actually added the numbers, and person X by virtue of the fact that he caused person Y to add the numbers. Furthermore, if person X is located within the United States and person Y is located outside the United States, then the method is performed in the United States by virtue of person X's participation in causing the step to be performed.

### IV. Articles of Manufacture or Kits

[0481] Provided herein are kits or articles of manufacture comprising one or more reagents for detecting an ALK fusion nucleic acid molecule or polypeptide of the disclosure (e.g., an ALK-ABCB11, ALK-ACTN4, ALK-AGAP1, ALK-APH1A, ALK-AZI2, ALK-BTBD9, ALK-C2orf73, ALK-CAPN14, ALK-CARMIL1, ALK-CASP8, ALK-CDC42BPA, ALK-CIB4, ALK-CNTNAP5, ALK-COL3A1, ALK-CPQ, ALK-CPSF7, ALK-CREBBP, ALK-CTBP1, ALK-CTNND1, ALK-CYP51A1, ALK-CYS1, ALK-EPHA2, ALK-FHOD3, ALK-FILIP1L, ALK-GMCL1, ALK-GPN1, ALK-GPR113, ALK-HADHA, ALK-HS1BP3, ALK-INTS9, ALK-ITGA6, ALK-KCTD18, ALK-KIF5C, ALK-KLC4, ALK-LINC00535, ALK-LRRFIP2, ALK-MAGOHB, ALK-MAMDC4, ALK-MANBA, ALK-MAP3K9, ALK-MED13L, ALK-METTL25, ALK-MTBP, ALK-MYH10, ALK-MYO5C, ALK-NFIA, ALK-NINJ2, ALK-OPRM1, ALK-OTX1, ALK-PAQR4, ALK-PDCD10, ALK-PDE3A, ALK-PELI1, ALK-PLEC, ALK-PTGER4, ALK-PTPRJ, ALK-QKI, ALK-RPS6KA5, ALK-SASH1, ALK-SEC16B, ALK-SKAP1, ALK-SLC25A13, ALK-SLC30A6, ALK-SNX17, ALK-SOX13, ALK-SRSF7, ALK-TANGO6, ALK-TG, ALK-TMCO3, ALK-TNS3, ALK-TRIM24, ALK-TTC28, ALK-UBE2L3, ALK-UBE3B, ALK-UTRN, ALK-VASP, ALK-WDR92, ALK-YPEL5, ALK-ZNF446, ALK-ZNF454, ALK-ZNF513, or ALK-ZSWIM2 fusion nucleic acid molecule or polypeptide described herein) in a sample.

[0482] In some embodiments, the kits or articles of manufacture comprise one or more probes of the disclosure for detecting an ALK fusion nucleic acid molecule of the disclosure in a sample, e.g., according to any detection method known in the art or described herein. In some embodiments, the kits or articles of manufacture comprise one or more baits (e.g., one or more bait molecules) of the disclosure for detecting an ALK fusion nucleic acid molecule of the disclosure in a sample, e.g., according to any detection method known in the art or described herein. In some embodiments, the kits or articles of manufacture comprise one or more oligonucleotides (e.g., one or more primers) of the disclosure for detecting an ALK fusion nucleic acid molecule of the disclosure in a sample, e.g., according to any detection method known in the art or described herein. In some embodiments of any of the kits or articles of manufacture provided herein, the kit or article of manufacture comprises a reagent (e.g., one or more oligonucleotides, primers, probes or baits of the present disclosure) for detecting a wild-type counterpart of an ALK fusion nucleic acid molecule of the disclosure (e.g., a wild type ALK gene, and/or a wild type fusion partner gene described herein and/or in Tables 1-7, and/or in the Examples herein). In some embodiments, one or more oligonucleotides, primers, probes or baits are capable of hybridizing to an ALK fusion nucleic acid molecule of the disclosure, or to a wild-type counterpart of the ALK fusion nucleic acid molecule (e.g., a wild type ALK gene, and/or a wild type fusion partner gene described herein and/or in Tables 1-7, and/or in the Examples herein). In some embodiments, the one or more oligonucleotides, primers, probes or baits of the present disclosure are capable of distinguishing an ALK fusion nucleic acid molecule of the disclosure from a wild-type counterpart of the ALK fusion nucleic acid molecule (e.g., a wild type ALK gene, and/or a wild type fusion partner gene described herein and/or in Tables 1-7, and/or in the Examples herein). In some embodiments, the kit is for use according to any method of detecting fusion nucleic acid molecules known in the art or described herein, such as sequencing, PCR, in situ hybridization methods, a nucleic acid hybridization assay, an amplification-based assay, a PCR-RFLP assay, real-time PCR, sequencing, next-generation sequencing, a screening analysis, FISH, spectral karyotyping, MFISH, comparative genomic hybridization, in situ hybridization, sequence-specific priming (SSP) PCR, HPLC, and mass-spectrometric genotyping. In some embodiments, a kit provided herein further comprises instructions for detecting an ALK fusion nucleic acid molecule of the disclosure, e.g., using one or more oligonucleotides, primers, probes or baits of the present disclosure.

[0483] In some embodiments, the kits or articles of manufacture comprise one or more antibodies or antibody fragments of the disclosure for detecting an ALK fusion polypeptide encoded of the disclosure, e.g., according to any detection method known in the art or described herein. In some embodiments, the kit or article of manufacture comprises a reagent (e.g., one or more antibodies of the present disclosure) for detecting the wild-type counterparts of an ALK fusion polypeptide provided herein (e.g., a wild type ALK polypeptide, and/or a wild type polypeptide encoded by a fusion partner gene described herein and/or in Tables 1-8, and/or in the Examples herein). In some embodiments, the kits or articles of manufacture comprise one or more antibodies of the present disclosure capable of binding to an ALK fusion polypeptide provided herein, or to wild-type counterparts of the ALK fusion polypeptide provided herein (e.g., a wild type ALK polypeptide, and/or a wild type polypeptide encoded by a fusion partner gene described herein and/or in Tables 1-8, and/or in the Examples herein). In some embodiments, the kit is for use according to any protein or polypeptide detection assay known in the art or described herein, such as mass spectrometry (e.g., tandem mass spectrometry), a reporter assay (e.g., a fluorescence-based assay), immunoblots such as a Western blot, immunoassays such as enzyme-linked immunosorbent assays (ELISA), immunohistochemistry, other immunological assays (e.g., fluid or gel precipitin reactions, immunodiffusion, immunoelectrophoresis, radioimmunoassay (RIA), immunofluorescent assays), and analytic biochemical methods (e.g., electrophoresis, capillary electrophoresis, high performance liquid chromatography (HPLC), thin layer chromatography (TLC), hyperdiffusion chromatography). In some embodiments, the kit further comprises instructions for detecting an ALK fusion polypeptide of the disclosure, e.g., using one or more antibodies of the present disclosure.

[0484] Further provided herein are kits or articles of manufacture comprising an anti-cancer therapy, such as an anti-cancer therapy described herein, and a package insert comprising instructions for using the anti-cancer therapy in a method of treating or delaying progression of cancer, e.g., by administration to an individual from whom a sample comprising an ALK fusion nucleic acid molecule or polypeptide of the disclosure has been obtained. In some embodiments, the anti-cancer therapy is any of the anti-cancer therapies described herein for use in any of the methods for treating or delaying progression of cancer of the disclosure. In some embodiments, the anti-cancer therapy is an ALK-targeted therapy.

[0485] The kit or article of manufacture may include, for example, a container and a label or package insert on or associated with the container. Suitable containers include, for example, bottles, vials, syringes, and the like. The container may be formed from a variety of materials such as glass or plastic. The container holds or contains a composition comprising one or more reagents for detecting an ALK fusion nucleic acid molecule or polypeptide of the disclosure (e.g., one or more oligonucleotides, primers, probes, baits, antibodies or antibody fragments of the present disclosure) or one or more anti-cancer therapies of the disclosure. In some embodiments, the container holds or contains a composition comprising one or more anti-cancer therapies of the disclosure and may have a sterile access port (e.g., the container may be an intravenous solution bag or a vial having a stopper pierceable by a hypodermic injection needle).

[0486] The kit or article of manufacture may further include a second container comprising a diluent or buffer, e.g., a pharmaceutically-acceptable diluent buffer, such as bacteriostatic water for injection (BWFI), phosphate-buffered saline, Ringer's solution, and/or dextrose solution. The article of manufacture may further include other materials desirable from a commercial and user standpoint, including other buffers, diluents, filters, needles, and syringes.

[0487] The kit or article of manufacture of the present disclosure also includes information or instructions, for example in the form of a package insert, indicating that the one or more reagents and/or anti-cancer therapies are used for detecting an ALK fusion nucleic acid molecule or polypeptide of the disclosure, or for treating cancer, as described herein. The insert or label may take any form, such as paper or on electronic media such as a magnetically recorded medium (e.g., floppy disk), a CD-ROM, a Universal Serial Bus (USB) flash drive, and the like. The label or insert may also include other information concerning the pharmaceutical compositions and dosage forms in the kit or article of manufacture.

### V. Nucleic Acids, Vectors, Host Cells and Recombinant Cells

[0488] Provided herein are nucleic acids and vectors comprising or encoding an ALK fusion nucleic acid molecule of the disclosure (e.g., an ALK-ABCB11, ALK-ACTN4, ALK-AGAP1, ALK-APH1A, ALK-AZI2, ALK-BTBD9, ALK-C2orf73, ALK-CAPN14, ALK-CARMIL1, ALK-CASP8, ALK-CDC42BPA, ALK-CIB4, ALK-CNTNAP5, ALK-COL3A1, ALK-CPQ, ALK-CPSF7, ALK-CREBBP, ALK-CTBP1, ALK-CTNND1, ALK-CYP51A1, ALK-CYS1, ALK-EPHA2, ALK-FHOD3, ALK-FILIP1L, ALK-GMCL1, ALK-GPN1, ALK-GPR113, ALK-HADHA, ALK-HS1BP3, ALK-INTS9, ALK-ITGA6, ALK-KCTD18, ALK-KIF5C, ALK-KLC4, ALK-LINC00535, ALK-LRRFIP2, ALK-MAGOHB, ALK-MAMDC4, ALK-MANBA, ALK-MAP3K9, ALK-MED13L, ALK-METTL25, ALK-MTBP, ALK-MYH10, ALK-MYO5C, ALK-NFIA, ALK-NINJ2, ALK-OPRM1, ALK-OTX1, ALK-PAQR4, ALK-PDCD10, ALK-PDE3A, ALK-PELI1, ALK-PLEC, ALK-PTGER4, ALK-PTPRJ, ALK-QKI, ALK-RPS6KA5, ALK-SASH1, ALK-SEC16B, ALK-SKAP1, ALK-SLC25A13, ALK-SLC30A6, ALK-SNX17, ALK-SOX13, ALK-SRSF7, ALK-TANGO6, ALK-TG, ALK-TMCO3, ALK-TNS3, ALK-TRIM24, ALK-TTC28, ALK-UBE2L3, ALK-UBE3B, ALK-UTRN, ALK-VASP, ALK-WDR92, ALK-YPEL5, ALK-ZNF446, ALK-ZNF454, ALK-ZNF513, or ALK-ZSWIM2 fusion nucleic acid molecule described herein), or a bait, a probe, or an oligonucleotide described herein, or fragments thereof.

[0489] In some embodiments, a nucleic acid or vector provided herein comprises or encodes an ALK fusion nucleic acid molecule of the disclosure, or a nucleic acid molecule encoding an ALK fusion polypeptide described herein.

[0490] In some embodiments, a vector provided herein is a nucleic acid molecule capable of transporting another nucleic acid to which it has been linked (e.g., ALK fusion nucleic acid molecules, baits, probes, or oligonucleotides described herein, or fragments thereof). In some embodiments, a vector is a plasmid, a cosmid or a viral vector. The vector may be capable of autonomous replication, or it can integrate into a host DNA. Viral vectors (e.g., comprising ALK fusion nucleic acid molecules, baits, probes, or oligonucleotides described herein, or fragments thereof) are also contemplated herein, including, e.g., replication defective retroviruses, adenoviruses and adeno-associated viruses.

[0491] In some embodiments, a nucleic acid or vector provided herein comprises an ALK fusion nucleic acid molecule, a bait, a probe, or an oligonucleotide of the disclosure in a form suitable for expression thereof in a host cell. In some embodiments, the nucleic acid or vector includes one or more regulatory sequences operatively linked to the nucleotide sequence to be expressed. In some embodiments, the one or more regulatory sequences include promoters (e.g., promoters derived from polyoma, Adenovirus 2, cytomegalovirus and Simian Virus 40), enhancers, and other expression control elements (e.g., polyadenylation signals). In some embodiments, a regulatory sequence directs constitutive expression of a nucleotide sequence (e.g., ALK fusion nucleic acid molecules, baits, probes, or oligonucleotides described herein, or fragments thereof). In some embodiments, a regulatory sequence directs tissue-specific expression of a nucleotide sequence (e.g., AKJ fusion nucleic acid molecules, baits, probes, or oligonucleotides described herein, or fragments thereof). In some embodiments, a regulatory sequence directs inducible expression of a nucleotide sequence (e.g., ALK fusion nucleic acid molecules, baits, probes, or oligonucleotides described herein, or fragments thereof). Examples of inducible regulatory sequences include, without limitation, promoters regulated by a steroid hormone, by a polypeptide hormone, or by a heterologous polypeptide, such as a tetracycline-inducible promoter. Examples of tissue- or cell-type-specific regulatory sequences include, without limitation, the albumin promoter, lymphoid-specific promoters, promoters of T cell receptors or immunoglobulins, neuron-specific promoters, pancreas-specific promoters, mammary gland-specific promoters, and developmentally-regulated promoters. In some embodiments, a vector provided herein comprises or encodes an ALK fusion nucleic acid molecule, a bait, a probe, or an oligonucleotide of the disclosure in the sense or the anti-sense orientation. In some embodiments, a nucleic acid or vector (e.g., an expression vector) provided herein is introduced into host cells to thereby produce a polypeptide, e.g., an ALK fusion polypeptide described herein, or a fragment or mutant form thereof.

[0492] In some embodiments, the design of a nucleic acid or vector provided herein depends on such factors as the choice of the host cell to be transformed, the level of expression desired, and the like. In some embodiments, expression vectors are designed for the expression of the ALK fusion nucleic acid molecules, baits, probes, or oligonucleotides described herein, or fragments thereof, in prokaryotic or eukaryotic cells, such as E. coli cells, insect cells (e.g., using baculovirus expression vectors), yeast cells, or mammalian cells. In some embodiments, a vector described herein is transcribed and translated in vitro, for example using T7 promoter regulatory sequences and T7 polymerase. In some embodiments, a vector (e.g., an expression vector) provided herein comprises or encodes an ALK fusion nucleic acid molecule described herein, wherein the nucleotide sequence of the ALK fusion nucleic acid molecule described herein has been altered (e.g., codon optimized) so that the individual codons for each encoded amino acid are those preferentially utilized in the host cell.

[0493] Also provided herein are host cells, e.g., comprising ALK fusion nucleic acid molecules, ALK fusion polypeptides, baits, probes, nucleic acids, vectors, or oligonucleotides of the disclosure. In some embodiments, a host cell (e.g., a recombinant host cell or recombinant cell) comprises a vector described herein (e.g., an expression vector described herein). In some embodiments, an ALK fusion nucleic acid molecule, bait, probe, nucleic acid, vector, or oligonucleotide provided herein further includes sequences which allow it to integrate into the host cell's genome (e.g., through homologous recombination at a specific site). In some embodiments, a host cell provided herein is a prokaryotic or eukaryotic cell. Non limiting examples of host cells include, without limitation, bacterial cells (e.g., E. coli), insect cells, yeast cells, or mammalian cells (e.g., human cells, rodent cells, mouse cells, rabbit cells, pig cells, Chinese hamster ovary cells (CHO), or COS cells, e.g., COS-7 cells, CV-1 origin SV40 cells). A host cell described herein includes the particular host cell, as well as the progeny of such a cell. Because certain modifications may occur in succeeding generations due to either mutation or environmental influences, such progeny may not, in fact, be identical to the parent host cell.

[0494] ALK fusion nucleic acid molecules, baits, probes, nucleic acids, vectors, or oligonucleotides of the disclosure may be introduced into host cells using any suitable method known in the art, such as conventional transformation or transfection techniques (e.g., using calcium phosphate or calcium chloride co-precipitation, DEAE-dextran-mediated transfection, lipofection, or electroporation).

[0495] Also provided herein are methods of producing an ALK fusion polypeptide of the disclosure, e.g., by culturing a host cell described herein (e.g., into which a recombinant expression vector encoding an ALK fusion polypeptide has been introduced) in a suitable medium such that the ALK fusion polypeptide is produced. In another embodiment, the method further includes isolating an ALK fusion polypeptide from the medium or the host cell.

### VI. Exemplary Embodiments

[0496] The following exemplary embodiments are representative of some aspects of the invention: Exemplary Embodiment 1: A method of identifying an individual having a cancer who may benefit from a treatment comprising an anaplastic lymphoma kinase (ALK)-targeted therapy, the method comprising detecting in a sample from the individual:
[0497] (a) an ALK fusion nucleic acid molecule comprising a fusion between an ALK gene, or a portion thereof, and a gene listed in Table 1, or a portion thereof, or
[0498] (b) an ALK fusion polypeptide encoded by the ALK fusion nucleic acid molecule,
[0499] wherein detection of the ALK fusion nucleic acid molecule or polypeptide in the sample identifies the individual as one who may benefit from the treatment comprising the ALK-targeted therapy.

[0500] Exemplary Embodiment 2: A method of selecting a therapy for an individual having a cancer, the method comprising detecting in a sample from the individual:
[0501] (a) an ALK fusion nucleic acid molecule comprising a fusion between an ALK gene, or a portion thereof, and a gene listed in Table 1, or a portion thereof, or
[0502] (b) an ALK fusion polypeptide encoded by the ALK fusion nucleic acid molecule,
[0503] wherein detection of the ALK fusion nucleic acid molecule or polypeptide in the sample identifies the individual as one who may benefit from a treatment comprising an ALK-targeted therapy.

[0504] Exemplary Embodiment 3: A method of identifying one or more treatment options for an individual having a cancer, the method comprising:
[0505] (a) detecting in a sample from the individual:
   [0506] (i) an ALK fusion nucleic acid molecule comprising a fusion between an ALK gene, or a portion thereof, and a gene listed in Table 1, or a portion thereof, or
   [0507] (ii) an ALK fusion polypeptide encoded by the ALK fusion nucleic acid molecule; and
[0508] (b) generating a report comprising one or more treatment options identified for the individual based at least in part on detection of the ALK fusion nucleic acid molecule or polypeptide in the sample, wherein the one or more treatment options comprise an ALK-targeted therapy.

[0509] Exemplary Embodiment 4: A method of identifying one or more treatment options for an individual having a cancer, the method comprising:
[0510] (a) acquiring knowledge of:
   [0511] (i) an ALK fusion nucleic acid molecule comprising a fusion between an ALK gene, or a portion thereof, and a gene listed in Table 1, or a portion thereof, or
   [0512] (ii) an ALK fusion polypeptide encoded by the ALK fusion nucleic acid molecule, in a sample from the individual; and
[0513] (b) generating a report comprising one or more treatment options identified for the individual based at least in part on said knowledge, wherein the one or more treatment options comprise an ALK-targeted therapy.

[0514] Exemplary Embodiment 5: A method of selecting a treatment for an individual having cancer, comprising acquiring knowledge of:
[0515] (a) an ALK fusion nucleic acid molecule comprising a fusion between an ALK gene, or a portion thereof, and a gene listed in Table 1, or a portion thereof, or
[0516] (b) an ALK fusion polypeptide encoded by the ALK fusion nucleic acid molecule, in a sample from an individual having a cancer,
[0517] wherein responsive to the acquisition of said knowledge: (i) the individual is classified as a candidate to receive a treatment comprising an ALK-targeted therapy; and/or (ii) the individual is identified as likely to respond to a treatment that comprises an ALK-targeted therapy.

[0518] Exemplary Embodiment 6: A method of predicting survival of an individual having a cancer, comprising acquiring knowledge of:
[0519] (a) an ALK fusion nucleic acid molecule comprising a fusion between an ALK gene, or a portion thereof, and a gene listed in Table 1, or a portion thereof, or
[0520] (b) an ALK fusion polypeptide encoded by the ALK fusion nucleic acid molecule, in a sample from the individual,
[0521] wherein responsive to the acquisition of said knowledge, the individual is predicted to have longer survival when treated with a treatment comprising an ALK-targeted therapy, as compared to survival of an individual whose cancer does not comprise an ALK fusion nucleic acid molecule or polypeptide.

[0522] Exemplary Embodiment 7: A method of predicting survival of an individual having a cancer treated with a treatment comprising an ALK-targeted therapy, the method comprising acquiring knowledge of:
[0523] (a) an ALK fusion nucleic acid molecule comprising a fusion between an ALK gene, or a portion thereof, and a gene listed in Table 1, or a portion thereof, or
[0524] (b) an ALK fusion polypeptide encoded by the ALK fusion nucleic acid molecule, in a sample from the individual,
[0525] wherein responsive to the acquisition of said knowledge, the individual is predicted to have longer survival when treated with a treatment comprising an ALK-targeted therapy, as compared to an individual whose cancer does not exhibit an ALK fusion nucleic acid molecule or polypeptide.

[0526] Exemplary Embodiment 8: A method of treating or delaying progression of cancer, comprising:
[0527] (a) acquiring knowledge of:
   [0528] (i) an ALK fusion nucleic acid molecule comprising a fusion between an ALK gene, or a portion thereof, and a gene listed in Table 1, or a portion thereof, or
   [0529] (ii) an ALK fusion polypeptide encoded by the ALK fusion nucleic acid molecule, in a sample from an individual having a cancer; and
[0530] (b) responsive to said knowledge, administering to the individual an effective amount of a treatment that comprises an ALK-targeted therapy.

[0531] Exemplary Embodiment 9: A method of treating or delaying progression of cancer, comprising administering to an individual having cancer an effective amount of a treatment that comprises an ALK-targeted therapy, wherein the ALK-targeted therapy is administered responsive to acquiring knowledge of:
[0532] (a) an ALK fusion nucleic acid molecule comprising a fusion between an ALK gene, or a portion thereof, and a gene listed in Table 1, or a portion thereof, or
[0533] (b) an ALK fusion polypeptide encoded by the ALK fusion nucleic acid molecule, in a sample from the individual.

[0534] Exemplary Embodiment 10: A method of monitoring, evaluating or screening an individual having a cancer, comprising acquiring knowledge of:
[0535] (a) an ALK fusion nucleic acid molecule comprising a fusion between an ALK gene, or a portion thereof, and a gene listed in Table 1, or a portion thereof, or
[0536] (b) an ALK fusion polypeptide encoded by the ALK fusion nucleic acid molecule, in a sample from the individual,
[0537] wherein responsive to the acquisition of said knowledge, the individual is predicted to have increased risk of cancer recurrence, aggressive cancer, anti-cancer therapy resistance, increased ALK expression, clinical benefit from an ALK-targeted therapy, or poor prognosis, as compared to an individual whose cancer does not comprise an ALK fusion nucleic acid molecule or polypeptide.

[0538] Exemplary Embodiment 11: The method of embodiment 10, wherein responsive to the acquisition of said knowledge, the individual is predicted to have resistance to a non-ALK-targeted anti-cancer therapy.

[0539] Exemplary Embodiment 12: A method of assessing an ALK fusion nucleic acid molecule or polypeptide in a cancer in an individual, the method comprising:
[0540] (a) detecting in a sample from the individual:
   [0541] (i) an ALK fusion nucleic acid molecule comprising a fusion between an ALK gene, or a portion thereof, and a gene listed in Table 1, or a portion thereof, or
   [0542] (ii) an ALK fusion polypeptide encoded by the ALK fusion nucleic acid molecule; and
[0543] (b) providing an assessment of the ALK fusion nucleic acid molecule or polypeptide.

[0544] Exemplary Embodiment 13: A method of detecting an ALK fusion nucleic acid molecule or polypeptide, the method comprising detecting in a sample from an individual having a cancer:
[0545] (a) an ALK fusion nucleic acid molecule comprising a fusion between an ALK gene, or a portion thereof, and a gene listed in Table 1, or a portion thereof, or
[0546] (b) an ALK fusion polypeptide encoded by the ALK fusion nucleic acid molecule.

[0547] Exemplary Embodiment 14: A method of detecting the presence or absence of a cancer in an individual, the method comprising:
[0548] (a) detecting the presence or absence of a cancer in a sample from the individual; and
[0549] (b) detecting in a sample from the individual the presence or absence of:
   [0550] (i) an ALK fusion nucleic acid molecule comprising a fusion between an ALK gene, or a portion thereof, and a gene listed in Table 1, or a portion thereof, or
   [0551] (ii) an ALK fusion polypeptide encoded by the ALK fusion nucleic acid molecule.

[0552] Exemplary Embodiment 15: The method of embodiment 14, comprising detecting the presence of the cancer in a sample from the individual.

[0553] Exemplary Embodiment 16: The method of embodiment 14 or embodiment 15, comprising detecting the presence of the ALK fusion nucleic acid molecule, or the ALK fusion polypeptide encoded by the ALK fusion nucleic acid molecule, in a sample from the individual.

[0554] Exemplary Embodiment 17: A method for monitoring progression or recurrence of a cancer in an individual, the method comprising:
[0555] (a) detecting, in a first sample obtained from the individual at a first time point, the presence or absence of: (i) an ALK fusion nucleic acid molecule comprising a fusion between an ALK gene, or a portion thereof, and a gene listed in Table 1, or a portion thereof, or (ii) an ALK fusion polypeptide encoded by the ALK fusion nucleic acid molecule;
[0556] (b) detecting, in a second sample obtained from the individual at a second time point after the first time point, the presence or absence of: (i) an ALK fusion nucleic acid molecule comprising a fusion between an ALK gene, or a portion thereof, and a gene listed in Table 1, or a portion thereof, or (ii) an ALK fusion polypeptide encoded by the ALK fusion nucleic acid molecule; and
[0557] (c) providing an assessment of cancer progression or cancer recurrence in the individual based, at least in part, on the presence or absence of the ALK fusion nucleic acid molecule or the ALK fusion polypeptide in the first sample and/or in the second sample.

[0558] Exemplary Embodiment 18: The method of embodiment 17, wherein the presence of the ALK fusion nucleic acid molecule or the ALK fusion polypeptide in the first sample and/or in the second sample identifies the individual as having increased risk of cancer progression or cancer recurrence.

[0559] Exemplary Embodiment 19: The method of embodiment 17 or embodiment 18, further comprising selecting a treatment, administering a treatment, adjusting a treatment, adjusting the dose of a treatment, or applying a treatment to the individual based, at least in part, on detecting the presence of the ALK fusion nucleic acid molecule or the ALK fusion polypeptide in the first sample and/or in the second sample, wherein the treatment comprises an ALK-targeted therapy.

[0560] Exemplary Embodiment 20: A method of detecting an ALK fusion nucleic acid molecule, the method comprising:
[0561] (a) providing a plurality of nucleic acid molecules obtained from a sample from an individual having a cancer, wherein the plurality of nucleic acid molecules comprises nucleic acid molecules corresponding to an ALK fusion nucleic acid molecule comprising a fusion between an ALK gene, or a portion thereof, and a gene listed in Table 1, or a portion thereof;
[0562] (b) optionally, ligating one or more adapters onto one or more nucleic acid molecules from the plurality of nucleic acid molecules;
[0563] (c) optionally, amplifying the one or more ligated nucleic acid molecules from the plurality of nucleic acid molecules;
[0564] (d) optionally, capturing amplified nucleic acid molecules from the amplified nucleic acid molecules;
[0565] (e) sequencing, by a sequencer, the captured nucleic acid molecules to obtain a plurality of sequence reads that represent the captured nucleic acid molecules, wherein one or more of the plurality of sequence reads correspond to the ALK fusion nucleic acid molecule;
[0566] (f) analyzing the plurality of sequence reads; and
[0567] (g) based on the analysis, detecting the presence or absence of the ALK fusion nucleic acid molecule in the sample.

[0568] Exemplary Embodiment 21: The method of embodiment 20, further comprising receiving, at one or more processors, sequence read data for the plurality of sequence reads.

[0569] Exemplary Embodiment 22: The method of embodiment 21, wherein the analyzing the plurality of sequence reads comprises identifying, using the one or more processors, the presence or absence of sequence reads corresponding to the ALK fusion nucleic acid molecule.

[0570] Exemplary Embodiment 23: The method of any one of embodiments 20-22, wherein the amplified nucleic acid molecules are captured by hybridization with one or more bait molecules.

[0571] Exemplary Embodiment 24: A method of detecting an ALK fusion nucleic acid molecule, the method comprising:
[0572] (a) providing a sample from an individual having a cancer, wherein the sample comprises a plurality of nucleic acid molecules;
[0573] (b) preparing a nucleic acid sequencing library from the plurality of nucleic acid molecules in the sample;
[0574] (c) amplifying said library;
[0575] (d) selectively enriching for one or more nucleic acid molecules comprising nucleotide sequences corresponding to an ALK fusion nucleic acid molecule in said library to produce an enriched sample, wherein the ALK fusion nucleic acid molecule comprises a fusion between an ALK gene, or a portion thereof, and a gene listed in Table 1, or a portion thereof;
[0576] (e) sequencing the enriched sample, thereby producing a plurality of sequence reads;
[0577] (f) analyzing the plurality of sequence reads for the presence of the ALK fusion nucleic acid molecule; and
[0578] (g) detecting, based on the analyzing step, the presence or absence of the ALK fusion nucleic acid molecule in the sample from the individual.

[0579] Exemplary Embodiment 25: The method of any one of embodiments 20-24, wherein the plurality of nucleic acid molecules comprises a mixture of cancer nucleic acid molecules and non-cancer nucleic acid molecules.

[0580] Exemplary Embodiment 26: The method of embodiment 25, wherein the cancer nucleic acid molecules are derived from a tumor portion of a heterogeneous tissue biopsy sample, and the non-cancer nucleic acid molecules are derived from a normal portion of the heterogeneous tissue biopsy sample.

[0581] Exemplary Embodiment 27: The method of embodiment 25, wherein the sample comprises a liquid biopsy sample, and wherein the cancer nucleic acid molecules are derived from a circulating tumor DNA (ctDNA) fraction of the liquid biopsy sample, and the non-cancer nucleic acid molecules are derived from a non-tumor fraction of the liquid biopsy sample.

[0582] Exemplary Embodiment 28: The method of any one of embodiments 20-23 and 25-27, wherein the one or more adapters comprise amplification primers, flow cell adapter sequences, substrate adapter sequences, sample index sequences, or unique molecular identifier (UMI) sequences.

[0583] Exemplary Embodiment 29: The method of any one of embodiments 24-27, wherein the selectively enriching comprises: (a) combining one or more bait molecules with the library, thereby hybridizing the one or more bait molecules to one or more nucleic acid molecules comprising nucleotide sequences corresponding to the ALK fusion nucleic acid molecule and producing nucleic acid hybrids; and (b) isolating the nucleic acid hybrids to produce the enriched sample.

[0584] Exemplary Embodiment 30: The method of any one of embodiments 20-23 and 25-28, wherein the captured nucleic acid molecules are captured from the amplified nucleic acid molecules by hybridization to one or more bait molecules.

[0585] Exemplary Embodiment 31: The method of any one of embodiments 20-30, wherein the amplifying comprises performing a polymerase chain reaction (PCR) amplification technique, a non-PCR amplification technique, or an isothermal amplification technique.

[0586] Exemplary Embodiment 32: The method of any one of embodiments 20-31, wherein the sequencing comprises use of a massively parallel sequencing (MPS) technique, whole genome sequencing (WGS), whole exome sequencing, targeted sequencing, direct sequencing, or a Sanger sequencing technique.

[0587] Exemplary Embodiment 33: The method of embodiment 32, wherein the sequencing comprises a massively parallel sequencing technique, and the massively parallel sequencing technique comprises next generation sequencing (NGS).

[0588] Exemplary Embodiment 34: The method of any one of embodiments 20-23, 25-28, and 30-33, wherein the sequencer comprises a next generation sequencer.

[0589] Exemplary Embodiment 35: The method of any one of embodiments 20-34, further comprising generating a molecular profile for the individual, based, at least in part, on detecting the presence or absence of the ALK fusion nucleic acid molecule.

[0590] Exemplary Embodiment 36: The method of embodiment 35, wherein the molecular profile for the individual further comprises results from a comprehensive genomic profiling (CGP) test, a gene expression profiling test, a cancer hotspot panel test, a DNA methylation test, a DNA fragmentation test, an RNA fragmentation test, or any combination thereof.

[0591] Exemplary Embodiment 37: The method of embodiment 35 or embodiment 36, wherein the molecular profile for the individual further comprises results from a nucleic acid sequencing-based test.

[0592] Exemplary Embodiment 38: The method of any one of embodiments 35-37, further comprising selecting a treatment, administering a treatment, or applying a treatment to the individual based on the generated molecular profile, wherein the treatment comprises an ALK-targeted therapy.

[0593] Exemplary Embodiment 39: The method of any one of embodiments 20-38, further comprising generating a report indicating the presence or absence of the ALK fusion nucleic acid molecule in the sample.

[0594] Exemplary Embodiment 40: The method of embodiment 21 or embodiment 22, further comprising generating, by the one or more processors, a report indicating the presence or absence of the ALK fusion nucleic acid molecule in the sample.

[0595] Exemplary Embodiment 41: The method of embodiment 39 or embodiment 40, further comprising transmitting the report to the individual, a caregiver, a healthcare provider, a physician, an oncologist, an electronic medical record system, a hospital, a clinic, a third-party payer, an insurance company, or a government office.

[0596] Exemplary Embodiment 42: The method of embodiment 41, wherein the report is transmitted via a computer network or a peer-to-peer connection.

[0597] Exemplary Embodiment 43: A method of identifying a candidate treatment for a cancer in an individual in need thereof, comprising performing DNA sequencing on a sample obtained from the individual to determine a sequencing mutation profile on a group of genes comprising one or more of ALK, one or more genes listed in Table 1, or any combination thereof, wherein the sequencing mutation profile identifies the presence or absence of an ALK fusion nucleic acid molecule, wherein the ALK fusion nucleic acid molecule comprises a fusion between an ALK gene, or a portion thereof, and a gene listed in Table 1, or a portion thereof.

[0598] Exemplary Embodiment 44: The method of embodiment 43, wherein the candidate treatment comprises an ALK-targeted therapy.

[0599] Exemplary Embodiment 45: The method of embodiment 43 or embodiment 44, wherein the presence of the ALK fusion nucleic acid molecule in the sample identifies the individual as one who may benefit from a treatment comprising an ALK-targeted therapy.

[0600] Exemplary Embodiment 46: The method of any one of embodiments 43-45, wherein the presence of the ALK fusion nucleic acid molecule in the sample predicts the individual to have longer survival when treated with a treatment comprising an ALK-targeted therapy, as compared to survival of an individual whose cancer does not comprise an ALK fusion nucleic acid molecule.

[0601] Exemplary Embodiment 47: The method of any one of embodiments 43-46, wherein the sequencing comprises use of a massively parallel sequencing (MPS) technique, whole genome sequencing (WGS), whole exome sequencing, targeted sequencing, direct sequencing, or a Sanger sequencing technique.

[0602] Exemplary Embodiment 48: The method of embodiment 47, wherein the sequencing comprises a massively parallel sequencing technique, and the massively parallel sequencing technique comprises next generation sequencing (NGS).

[0603] Exemplary Embodiment 49: The method of any one of embodiments 43-48, wherein the sequencing mutation profile identifies the presence or absence of a fragment of the ALK fusion nucleic acid molecule comprising a breakpoint or fusion junction.

[0604] Exemplary Embodiment 50: A method of treating or delaying progression of cancer, comprising:
[0605] (a) detecting in a sample from an individual having a cancer:
   [0606] (i) an ALK fusion nucleic acid molecule comprising a fusion between an ALK gene, or a portion thereof, and a gene listed in Table 1, or a portion thereof, or
   [0607] (ii) an ALK fusion polypeptide encoded by the ALK fusion nucleic acid molecule; and
[0608] (b) administering to the individual an effective amount of a treatment that comprises an ALK-targeted therapy.

[0609] Exemplary Embodiment 51: The method of any one of embodiments 1-50, wherein the ALK fusion nucleic acid molecule is an ALK fusion nucleic acid molecule listed in Table 2, and wherein the order of the genes in the fusion in the 5′ to 3′ direction is as listed in Table 2.

[0610] Exemplary Embodiment 52: The method of any one of embodiments 1-51, wherein the ALK fusion nucleic acid molecule is an ALK fusion nucleic acid molecule listed in Table 3, and wherein the ALK fusion nucleic acid molecule comprises or results from a corresponding 5′ breakpoint and/or 3′ breakpoint within the exons or introns as listed in Table 3.

[0611] Exemplary Embodiment 53: The method of any one of embodiments 1-52, wherein the ALK fusion nucleic acid molecule is an ALK fusion nucleic acid molecule listed in Table 4, and wherein the ALK fusion nucleic acid molecule comprises or results from a corresponding 5′ breakpoint within the chromosomal coordinates as listed in Table 4, and/or a corresponding 3′ breakpoint within the chromosomal coordinates as listed in Table 4.

[0612] Exemplary Embodiment 54: The method of any one of embodiments 1-53, wherein the ALK fusion nucleic acid molecule is an ALK fusion nucleic acid molecule listed in Table 5, and wherein the ALK fusion nucleic acid molecule comprises or results from a fusion of a corresponding 5′ exon as listed in Table 5, or a portion thereof, fused to a corresponding 3′ exon as listed in Table 5, or a portion thereof.

[0613] Exemplary Embodiment 55: The method of any one of embodiments 1-54, wherein the ALK fusion nucleic acid molecule is an ALK fusion nucleic acid molecule listed in Table 6, and wherein the ALK fusion nucleic acid molecule comprises, in the 5′ to 3′ direction, the corresponding exons or portions thereof as listed in Table 6.

[0614] Exemplary Embodiment 56: The method of any one of embodiments 1-55, wherein the ALK fusion nucleic acid molecule is an ALK fusion nucleic acid molecule listed in Table 7, and wherein the ALK fusion nucleic acid molecule comprises a corresponding nucleotide sequence as listed in Table 7, or a nucleotide sequence with at least about 70% homology thereto.

[0615] Exemplary Embodiment 57: The method of any one of embodiments 1-56, wherein the ALK fusion nucleic acid molecule encodes an ALK fusion polypeptide.

[0616] Exemplary Embodiment 58: The method of any one of embodiments 1-57, wherein the ALK fusion nucleic acid molecule comprises a nucleotide sequence encoding an ALK fusion polypeptide that comprises an amino acid sequence as listed in Table 8, or an amino acid sequence with at least about 70% homology thereto.

[0617] Exemplary Embodiment 59: The method of any one of embodiments 1-58, wherein the ALK fusion polypeptide encoded by the ALK fusion nucleic acid molecule comprises an ALK kinase domain, or a fragment of an ALK kinase domain having ALK kinase activity.

[0618] Exemplary Embodiment 60: The method of any one of embodiments 1-59, wherein the ALK fusion polypeptide encoded by the ALK fusion nucleic acid molecule has ALK kinase activity.

[0619] Exemplary Embodiment 61: The method of any one of embodiments 1-60, wherein the ALK fusion polypeptide encoded by the ALK fusion nucleic acid molecule has a constitutive ALK kinase activity.

[0620] Exemplary Embodiment 62: The method of any one of embodiments 1-61, wherein the ALK fusion polypeptide encoded by the ALK fusion nucleic acid molecule is oncogenic.

[0621] Exemplary Embodiment 63: The method of any one of embodiments 1-62, wherein the ALK fusion polypeptide encoded by the ALK fusion nucleic acid molecule promotes cancer cell survival, angiogenesis, cancer cell proliferation, and any combination thereof.

[0622] Exemplary Embodiment 64: The method of any one of embodiments 1-63, wherein the ALK fusion polypeptide encoded by the ALK fusion nucleic acid molecule is capable of dimerizing with an ALK polypeptide or with another ALK fusion polypeptide in a cancer cell.

[0623] Exemplary Embodiment 65: The method of any one of embodiments 1-64, wherein the ALK fusion polypeptide encoded by the ALK fusion nucleic acid molecule is an ALK fusion polypeptide listed in Table 8, and wherein the ALK fusion polypeptide comprises a corresponding amino acid sequence as listed in Table 8, or an amino acid sequence with at least about 70% homology thereto.

[0624] Exemplary Embodiment 66: The method of any one of embodiments 1-65, wherein the cancer is a carcinoma, a sarcoma, a lymphoma, a leukemia, a myeloma, a germ cell cancer, or a blastoma.

[0625] Exemplary Embodiment 67: The method of any one of embodiments 1-66, wherein the cancer is a solid tumor.

[0626] Exemplary Embodiment 68: The method of any one of embodiments 1-66, wherein the cancer is a hematologic malignancy.

[0627] Exemplary Embodiment 69: The method of any one of embodiments 1-66, wherein the cancer is a lymphoma.

[0628] Exemplary Embodiment 70: The method of any one of embodiments 1-66, wherein the cancer is a non-small cell lung carcinoma, a leiomyosarcoma, a thyroid carcinoma, a colorectal cancer, a pancreatic cancer, or a malignant peritoneal mesothelioma.

[0629] Exemplary Embodiment 71: The method of any one of embodiments 1-66, wherein the cancer is a B cell cancer, multiple myeloma, a melanoma, breast cancer, lung cancer, bronchus cancer, colorectal cancer, prostate cancer, pancreatic cancer, stomach cancer, ovarian cancer, urinary bladder cancer, brain cancer, central nervous system cancer, peripheral nervous system cancer, esophageal cancer, cervical cancer, uterine cancer, endometrial cancer, cancer of an oral cavity, cancer of a pharynx, liver cancer, kidney cancer, testicular cancer, biliary tract cancer, small bowel cancer, appendix cancer, salivary gland cancer, thyroid gland cancer, adrenal gland cancer, osteosarcoma, chondrosarcoma, a cancer of hematological tissue, an adenocarcinoma, an inflammatory myofibroblastic tumor, a gastrointestinal stromal tumor (GIST), colon cancer, myelodysplastic syndrome (MDS), myeloproliferative disorder (MPD), acute lymphocytic leukemia (ALL), acute myelocytic leukemia (AML), chronic myelocytic leukemia (CML), chronic lymphocytic leukemia (CLL), polycythemia Vera, Hodgkin lymphoma, non-Hodgkin lymphoma (NHL), soft-tissue sarcoma, fibrosarcoma, myxosarcoma, liposarcoma, osteogenic sarcoma, chordoma, angiosarcoma, endotheliosarcoma, lymphangiosarcoma, lymphangioendotheliosarcoma, synovioma, mesothelioma, Ewing's tumor, leiomyosarcoma, rhabdomyosarcoma, squamous cell carcinoma, basal cell carcinoma, adenocarcinoma, sweat gland carcinoma, sebaceous gland carcinoma, papillary carcinoma, papillary adenocarcinomas, medullary carcinoma, bronchogenic carcinoma, renal cell carcinoma, hepatoma, bile duct carcinoma, choriocarcinoma, seminoma, embryonal carcinoma, Wilms' tumor, bladder carcinoma, epithelial carcinoma, glioma, astrocytoma, medulloblastoma, craniopharyngioma, ependymoma, pinealoma, hemangioblastoma, acoustic neuroma, oligodendroglioma, meningioma, neuroblastoma, retinoblastoma, follicular lymphoma, diffuse large B-cell lymphoma, mantle cell lymphoma, hepatocellular carcinoma, thyroid cancer, gastric cancer, head and neck cancer, small cell cancer, essential thrombocythemia, agnogenic myeloid metaplasia, hypereosinophilic syndrome, systemic mastocytosis, familiar hypereosinophilia, chronic eosinophilic leukemia, neuroendocrine cancers, or a carcinoid tumor.

[0630] Exemplary Embodiment 72: The method of any one of embodiments 1-66, wherein the cancer is an anus squamous cell carcinoma, brain glioblastoma (GBM), breast cancer, breast carcinoma, breast invasive ductal carcinoma (IDC), colon adenocarcinoma (CRC), esophagus adenocarcinoma, fallopian tube serous carcinoma, gallbladder adenocarcinoma, gallbladder carcinoma, gastroesophageal junction adenocarcinoma, lung adenocarcinoma, lung non-small cell lung carcinoma, lung non-small cell lung carcinoma, lymph node Castleman's disease, lymph node lymphoma T-cell, ovary clear cell carcinoma, ovary endometrioid adenocarcinoma, ovary epithelial carcinoma, ovary high grade serous carcinoma, ovary serous carcinoma, pancreas cancer, pancreas ductal adenocarcinoma, pediatric bone osteosarcoma, bone osteosarcoma, pediatric skin melanoma, skin melanoma, pediatric soft tissue sarcoma, soft tissue sarcoma, pediatric soft tissue sarcoma undifferentiated, soft tissue sarcoma undifferentiated, peritoneum serous carcinoma, prostate acinar adenocarcinoma, small intestine adenocarcinoma, soft tissue leiomyosarcoma, soft tissue liposarcoma, thyroid papillary carcinoma, unknown primary adenocarcinoma, unknown primary carcinoma, unknown primary malignant neoplasm, unknown primary myoepithelial carcinoma, uterus carcinosarcoma, uterus endometrial adenocarcinoma endometrioid, uterus leiomyosarcoma, or vulva squamous cell carcinoma (SCC).

[0631] Exemplary Embodiment 73: The method of any one of embodiments 51-65, wherein the ALK fusion nucleic acid molecule is an ALK fusion nucleic acid molecule listed in Table 9, or the ALK fusion polypeptide is an ALK fusion polypeptide listed in Table 9, and wherein the cancer is the corresponding cancer as listed in Table 9.

[0632] Exemplary Embodiment 74: The method of any one of embodiments 1-73, wherein the cancer is metastatic.

[0633] Exemplary Embodiment 75: The method of embodiment 74, wherein the cancer has metastasized to the brain of the individual.

[0634] Exemplary Embodiment 76: The method of embodiment 74, wherein the individual has an intracranial metastasis of the cancer.

[0635] Exemplary Embodiment 77: The method of embodiment 74, wherein the individual has an extracranial metastasis of the cancer.

[0636] Exemplary Embodiment 78: The method of any one of embodiments 1-74, wherein the cancer has not metastasized to the brain of the individual.

[0637] Exemplary Embodiment 79: The method of any one of embodiments 1-74, wherein the individual does not have an intracranial metastasis of the cancer.

[0638] Exemplary Embodiment 80: The method of any one of embodiments 1-73, wherein the individual does not have an extracranial metastasis of the cancer.

[0639] Exemplary Embodiment 81: The method of any one of embodiments 1-11, 19, 38, and 44-80, wherein the ALK-targeted therapy comprises one or more of a small molecule inhibitor, an antibody, a cellular therapy, a nucleic acid, a virus-based therapy, an antibody-drug conjugate, a recombinant protein, a fusion protein, a natural compound, a peptide, a PROteolysis-TArgeting Chimera (PROTAC), a treatment for ALK-positive or ALK-rearranged cancer, an ALK-targeted therapy being tested in a clinical trial, a treatment for ALK-positive or ALK-rearranged cancer being tested in a clinical trial, or any combination thereof.

[0640] Exemplary Embodiment 82: The method of any one of embodiments 1-11, 19, 38, and 44-81, wherein the ALK-targeted therapy is a kinase inhibitor.

[0641] Exemplary Embodiment 83: The method of embodiment 82, wherein the ALK-targeted therapy is a tyrosine kinase inhibitor.

[0642] Exemplary Embodiment 84: The method of embodiment 82 or embodiment 83, wherein the ALK-targeted therapy is kinase inhibitor that inhibits the kinase activity of an ALK polypeptide.

[0643] Exemplary Embodiment 85: The method of any one of embodiments 82-84, wherein the ALK-targeted therapy is a multi-kinase inhibitor or an ALK-specific inhibitor.

[0644] Exemplary Embodiment 86: The method of any one of embodiments 82-85, wherein the ALK-targeted therapy comprises one or more of crizotinib, alectinib, ceritinib, lorlatinib, brigatinib, ensartinib (X-396), repotrectinib (TPX-005), entrectinib (RXDX-101), AZD3463, CEP-37440, belizatinib (TSR-011), ASP3026, KRCA-0008, TQ-B3139, TPX-0131, TAE684 (NVP-TAE684), CT-707, WX-0593, alkotinib, SIM1803-1A, PLB1003, SAF-189s, PF03446962, TQ-B3101, APG-2449, X-376, CEP-28122, and GSK1838705A.

[0645] Exemplary Embodiment 87: The method of embodiment 81, wherein the nucleic acid inhibits the expression of the ALK fusion nucleic acid molecule or polypeptide.

[0646] Exemplary Embodiment 88: The method of embodiment 87, wherein the nucleic acid is a double-stranded RNA (dsRNA), a small interfering RNA (siRNA), or a small hairpin RNA (shRNA).

[0647] Exemplary Embodiment 89: The method of embodiment 81, wherein the cellular therapy is an adoptive therapy, a T cell-based therapy, a natural killer (NK) cell-based therapy, a chimeric antigen receptor (CAR)-T cell therapy, a recombinant T cell receptor (TCR) T cell therapy, a macrophage-based therapy, an induced pluripotent stem cell-based therapy, a B cell-based therapy, or a dendritic cell (DC)-based therapy.

[0648] Exemplary Embodiment 90: The method of any one of embodiments 1-89, wherein the individual has received a prior anti-cancer treatment, or is being treated with an anti-cancer treatment.

[0649] Exemplary Embodiment 91: The method of embodiment 90, wherein the ALK fusion nucleic acid molecule, and/or the ALK fusion polypeptide encoded by the ALK fusion nucleic acid molecule, confers resistance of the cancer to the anti-cancer treatment.

[0650] Exemplary Embodiment 92: The method of embodiment 90 or embodiment 91, wherein the anti-cancer treatment is a small molecule inhibitor, an antibody, a cellular therapy, a nucleic acid, a virus-based therapy, an antibody-drug conjugate, a recombinant protein, a fusion protein, a natural compound, a peptide, a PROteolysis-TArgeting Chimera (PROTAC), a treatment for cancer being tested in a clinical trial, an immunotherapy, a chemotherapy, a targeted therapy, a non-ALK-targeted anti-cancer therapy, or any combination thereof.

[0651] Exemplary Embodiment 93: The method of embodiment 92, wherein the cellular therapy is an adoptive therapy, a T cell-based therapy, a natural killer (NK) cell-based therapy, a chimeric antigen receptor (CAR)-T cell therapy, a recombinant T cell receptor (TCR) T cell therapy, a macrophage-based therapy, an induced pluripotent stem cell-based therapy, a B cell-based therapy, or a dendritic cell (DC)-based therapy.

[0652] Exemplary Embodiment 94: The method of embodiment 92, wherein the nucleic acid comprises a double-stranded RNA (dsRNA), a small interfering RNA (siRNA), or a small hairpin RNA (shRNA).

[0653] Exemplary Embodiment 95: The method of any one of embodiments 1-89, wherein the cancer has not been previously treated.

[0654] Exemplary Embodiment 96: The method of any one of embodiments 1-11, 19, 38, 44-89, and 95, wherein the ALK-targeted therapy is a first-line or front-line treatment.

[0655] Exemplary Embodiment 97: The method of embodiment 95 or embodiment 96, wherein the ALK-targeted therapy is brigatinib.

[0656] Exemplary Embodiment 98: The method of embodiment 95 or embodiment 96, wherein the ALK-targeted therapy is crizotinib.

[0657] Exemplary Embodiment 99: The method of embodiment 95 or embodiment 96, wherein the ALK-targeted therapy is lorlatinib.

[0658] Exemplary Embodiment 100: The method of embodiment 95 or embodiment 96, wherein the ALK-targeted therapy is a kinase inhibitor in combination with a PD-1- or a PD-L1-targeted agent.

[0659] Exemplary Embodiment 101: The method of embodiment 100, wherein the kinase inhibitor is a tyrosine kinase inhibitor.

[0660] Exemplary Embodiment 102: The method of embodiment 100 or embodiment 101, wherein the kinase inhibitor inhibits the kinase activity of an ALK polypeptide.

[0661] Exemplary Embodiment 103: The method of any one of embodiments 100-102, wherein the kinase inhibitor is a multi-kinase inhibitor or an ALK-specific inhibitor.

[0662] Exemplary Embodiment 104: The method of any one of embodiments 100-103, wherein the kinase inhibitor comprises one or more of crizotinib, alectinib, ceritinib, lorlatinib, brigatinib, ensartinib (X-396), repotrectinib (TPX-005), entrectinib (RXDX-101), AZD3463, CEP-37440, belizatinib (TSR-011), ASP3026, KRCA-0008, TQ-B3139, TPX-0131, and TAE684 (NVP-TAE684).

[0663] Exemplary Embodiment 105: The method of any one of embodiments 100-104, wherein the PD-1-targeted agent is a PD-1 inhibitor.

[0664] Exemplary Embodiment 106: The method of embodiment 105, wherein the PD-1 inhibitor comprises one or more of nivolumab, pembrolizumab, cemiplimab, or dostarlimab.

[0665] Exemplary Embodiment 107: The method of any one of embodiments 100-104, wherein the PD-L1-targeted agent is a PD-L1 inhibitor.

[0666] Exemplary Embodiment 108: The method of embodiment 107, wherein the PD-L1 inhibitor comprises one or more of atezolizumab, avelumab, or durvalumab.

[0667] Exemplary Embodiment 109: The method of embodiment 100, wherein the ALK-targeted therapy is alectinib in combination with a PD-1- or a PD-L1-targeted agent.

[0668] Exemplary Embodiment 110: The method of embodiment 109, wherein the ALK-targeted therapy is alectinib in combination with atezolizumab.

[0669] Exemplary Embodiment 111: The method of any one of embodiments 95-110, wherein the cancer is a non-small cell lung carcinoma.

[0670] Exemplary Embodiment 112: The method of any one of embodiments 1-89, wherein the cancer has not been previously treated with crizotinib.

[0671] Exemplary Embodiment 113: The method of any one of embodiments 1-89, wherein the cancer is crizotinib-naïve.

[0672] Exemplary Embodiment 114: The method of embodiment 112 or embodiment 113, wherein the ALK-targeted therapy is brigatinib.

[0673] Exemplary Embodiment 115: The method of any one of embodiments 1-89, wherein the cancer is kinase inhibitor-naïve.

[0674] Exemplary Embodiment 116: The method of any one of embodiments 1-89, wherein the cancer has not been previously treated with a kinase inhibitor.

[0675] Exemplary Embodiment 117: The method of embodiment 115 or embodiment 116, wherein the ALK-targeted therapy is crizotinib or alectinib.

[0676] Exemplary Embodiment 118: The method of embodiment 115 or embodiment 116, wherein the ALK-targeted therapy is alectinib.

[0677] Exemplary Embodiment 119: The method of embodiment 115 or embodiment 116, wherein the ALK-targeted therapy is ceritinib.

[0678] Exemplary Embodiment 120: The method of any one of embodiments 115-119, wherein the cancer is a non-small cell lung carcinoma

[0679] Exemplary Embodiment 121: The method of any one of embodiments 115-120, wherein the cancer is a kinase inhibitor-naïve non-small cell lung carcinoma.

[0680] Exemplary Embodiment 122: The method of any one of embodiments 1-89, wherein the cancer has been previously treated with a kinase inhibitor.

[0681] Exemplary Embodiment 123: The method of any one of embodiments 1-89 and 122, wherein the cancer progressed on a prior treatment with a kinase inhibitor.

[0682] Exemplary Embodiment 124: The method of any one of embodiments 1-89 and 122-123, wherein the cancer is refractory to a prior kinase inhibitor treatment.

[0683] Exemplary Embodiment 125: The method of any one of embodiments 1-89 and 122-124, wherein the cancer progressed on a prior treatment with a chemotherapy and a kinase inhibitor.

[0684] Exemplary Embodiment 126: The method of any one of embodiments 122-125, wherein the kinase inhibitor is a tyrosine kinase inhibitor.

[0685] Exemplary Embodiment 127: The method of any one of embodiments 122-126, wherein the kinase inhibitor inhibits the kinase activity of an ALK polypeptide.

[0686] Exemplary Embodiment 128: The method of any one of embodiments 122-127, wherein the kinase inhibitor is a multi-kinase inhibitor or an ALK-specific inhibitor.

[0687] Exemplary Embodiment 129: The method of any one of embodiments 122-124, wherein the ALK-targeted therapy is lorlatinib.

[0688] Exemplary Embodiment 130: The method of any one of embodiments 122-124, wherein the kinase inhibitor is crizotinib, and the ALK-targeted therapy is alectinib, ceritinib or brigatinib.

[0689] Exemplary Embodiment 131: The method of any one of embodiments 122-124, wherein the kinase inhibitor is alectinib, and the ALK-targeted therapy is brigatinib.

[0690] Exemplary Embodiment 132: The method of any one of embodiments 122-124, wherein the cancer progressed on a prior crizotinib treatment, and wherein the ALK-targeted therapy comprises continued treatment with crizotinib.

[0691] Exemplary Embodiment 133: The method of any one of embodiments 122-124, wherein the cancer progressed on a prior lorlatinib treatment, and wherein the ALK-targeted therapy comprises continued treatment with lorlatinib.

[0692] Exemplary Embodiment 134: The method of any one of embodiments 125-128, wherein the kinase inhibitor is crizotinib, and the ALK-targeted therapy is ceritinib.

[0693] Exemplary Embodiment 135: The method of any one of embodiments 122-134, wherein the cancer is a non-small cell lung carcinoma.

[0694] Exemplary Embodiment 136: The method of any one of embodiments 1-67 and 70-89, wherein the cancer is a solid tumor, and wherein the ALK-targeted therapy is entrectinib.

[0695] Exemplary Embodiment 137: The method of embodiment 136, wherein the cancer is a non-small cell lung carcinoma, a renal cell carcinoma, a colorectal cancer, or an inflammatory myofibroblastic tumor.

[0696] Exemplary Embodiment 138: The method of any one of embodiments 1-11, 19, 38, and 44-89, wherein the ALK-targeted therapy is a fourth line treatment.

[0697] Exemplary Embodiment 139: The method of embodiment 138, wherein the ALK-targeted therapy is lorlatinib.

[0698] Exemplary Embodiment 140: The method of embodiment 138 or embodiment 139, wherein the cancer is an inflammatory myofibroblastic sarcoma, optionally, wherein the inflammatory myofibroblastic sarcoma is metastatic.

[0699] Exemplary Embodiment 141: The method of any one of embodiments 138-140, wherein the individual has leptomeningeal disease.

[0700] Exemplary Embodiment 142: The method of any one of embodiments 1-141, wherein the cancer further comprises one or more mutations in an ALK kinase domain encoded by an ALK gene.

[0701] Exemplary Embodiment 143: The method of any one of embodiments 1-142, wherein the ALK fusion nucleic acid molecule encodes an ALK fusion polypeptide comprising an ALK kinase domain, or a portion thereof, comprising one or more mutations in the ALK kinase domain.

[0702] Exemplary Embodiment 144: The method of any one of embodiments 1-19 and 50-142, wherein the ALK fusion polypeptide encoded by the ALK fusion nucleic acid molecule comprises an ALK kinase domain, or a portion thereof, comprising one or more mutations in the ALK kinase domain.

[0703] Exemplary Embodiment 145: The method of any one of embodiments 142-144, wherein the one or more mutations in the ALK kinase domain comprise an amino acid substitution at amino acid position G1202 of the ALK kinase domain, optionally wherein the amino acid substitution is a G1202R amino acid substitution.

[0704] Exemplary Embodiment 146: The method of any one of embodiments 142-145, wherein the ALK-targeted therapy is lorlatinib.

[0705] Exemplary Embodiment 147: The method of any one of embodiments 1-89, wherein the cancer was previously treated with crizotinib, and wherein the ALK-targeted therapy is brigatinib.

[0706] Exemplary Embodiment 148: The method of embodiment 147, wherein the cancer is a non-small cell lung carcinoma.

[0707] Exemplary Embodiment 149: The method of any one of embodiments 1-89, wherein the cancer is a colorectal cancer, and wherein the ALK-targeted therapy is ceritinib.

[0708] Exemplary Embodiment 150: The method of any one of embodiments 1-89, wherein the cancer is a pancreatic cancer, and wherein the ALK-targeted therapy is ceritinib.

[0709] Exemplary Embodiment 151: The method of embodiment 150, wherein the cancer is a pancreatic ductal adenocarcinoma.

[0710] Exemplary Embodiment 152: The method of any one of embodiments 1-11, 19, 38, and 44-89, wherein the ALK-targeted therapy is a kinase inhibitor in combination with a PD-1- or a PD-L1-targeted agent.

[0711] Exemplary Embodiment 153: The method of embodiment 152, wherein the kinase inhibitor is a tyrosine kinase inhibitor.

[0712] Exemplary Embodiment 154: The method of embodiment 152 or embodiment 153, wherein the kinase inhibitor inhibits the kinase activity of an ALK polypeptide.

[0713] Exemplary Embodiment 155: The method of any one of embodiments 152-154, wherein the kinase inhibitor is a multi-kinase inhibitor or an ALK-specific inhibitor.

[0714] Exemplary Embodiment 156: The method of any one of embodiments 152-155, wherein the kinase inhibitor comprises one or more of crizotinib, alectinib, ceritinib, lorlatinib, brigatinib, ensartinib (X-396), repotrectinib (TPX-005), entrectinib (RXDX-101), AZD3463, CEP-37440, belizatinib (TSR-011), ASP3026, KRCA-0008, TQ-B3139, TPX-0131, and TAE684 (NVP-TAE684).

[0715] Exemplary Embodiment 157: The method of any one of embodiments 152-156, wherein the PD-1-targeted agent is a PD-1 inhibitor.

[0716] Exemplary Embodiment 158: The method of embodiment 157, wherein the PD-1 inhibitor comprises one or more of nivolumab, pembrolizumab, cemiplimab, or dostarlimab.

[0717] Exemplary Embodiment 159: The method of any one of embodiments 152-156, wherein the PD-L1-targeted agent is a PD-L1 inhibitor.

[0718] Exemplary Embodiment 160: The method of embodiment 159, wherein the PD-L1 inhibitor comprises one or more of atezolizumab, avelumab, or durvalumab.

[0719] Exemplary Embodiment 161: The method of embodiment 152, wherein the ALK-targeted therapy is lorlatinib in combination with avelumab.

[0720] Exemplary Embodiment 162: The method of any one of embodiments 152-161, wherein the cancer is a non-small cell lung carcinoma.

[0721] Exemplary Embodiment 163: The method of any one of embodiments 1-11, 19, 38, and 44-162, wherein the treatment or the one or more treatment options further comprise an additional anti-cancer therapy.

[0722] Exemplary Embodiment 164: The method of embodiment 163, wherein the additional anti-cancer therapy comprises one or more of a small molecule inhibitor, a chemotherapeutic agent, a cancer immunotherapy, an antibody, a cellular therapy, a nucleic acid, a surgery, a radiotherapy, an anti-angiogenic therapy, an anti-DNA repair therapy, an anti-inflammatory therapy, an anti-neoplastic agent, a growth inhibitory agent, a cytotoxic agent, a vaccine, a small molecule agonist, a virus-based therapy, an antibody-drug conjugate, a recombinant protein, a fusion protein, a natural compound, a peptide, a PROteolysis-TArgeting Chimera (PROTAC), or any combination thereof.

[0723] Exemplary Embodiment 165: The method of embodiment 164, wherein the cellular therapy is an adoptive therapy, a T cell-based therapy, a natural killer (NK) cell-based therapy, a chimeric antigen receptor (CAR)-T cell therapy, a recombinant T cell receptor (TCR) T cell therapy, a macrophage-based therapy, an induced pluripotent stem cell-based therapy, a B cell-based therapy, or a dendritic cell (DC)-based therapy.

[0724] Exemplary Embodiment 166: The method of embodiment 163, wherein the additional anti-cancer therapy comprises one or more of a heat shock protein 90 inhibitor, an EGFR inhibitor, a SHP2 inhibitor, a MEK inhibitor, an IGF-1R inhibitor, a vascular endothelial growth factor (VEGF)-targeted therapy, or an mTOR inhibitor.

[0725] Exemplary Embodiment 167: The method of embodiment 164, wherein the nucleic acid comprises a double-stranded RNA (dsRNA), a small interfering RNA (siRNA), or a small hairpin RNA (shRNA).

[0726] Exemplary Embodiment 168: The method of any one of embodiments 1-167, further comprising obtaining the sample from the individual.

[0727] Exemplary Embodiment 169: The method of any one of embodiments 1-168, wherein the sample is obtained from the cancer.

[0728] Exemplary Embodiment 170: The method of any one of embodiments 1-169, wherein the sample comprises a tissue biopsy sample, a liquid biopsy sample, or a normal control.

[0729] Exemplary Embodiment 171: The method of embodiment 170, wherein the sample is from a tumor biopsy, tumor specimen, or circulating tumor cell.

[0730] Exemplary Embodiment 172: The method of any one of embodiments 1-170, wherein the sample is a liquid biopsy sample and comprises blood, plasma, cerebrospinal fluid, sputum, stool, urine, or saliva.

[0731] Exemplary Embodiment 173: The method of any one of embodiments 1-172, wherein the sample comprises cells and/or nucleic acids from the cancer.

[0732] Exemplary Embodiment 174: The method of embodiment 173, wherein the sample comprises mRNA, DNA, circulating tumor DNA (ctDNA), cell-free DNA, or cell-free RNA from the cancer.

[0733] Exemplary Embodiment 175: The method of embodiment 172, wherein the sample is a liquid biopsy sample and comprises circulating tumor cells (CTCs).

[0734] Exemplary Embodiment 176: The method of embodiment 172, wherein the sample is a liquid biopsy sample and comprises cell-free DNA (cfDNA), circulating tumor DNA (ctDNA), or any combination thereof.

[0735] Exemplary Embodiment 177: The method of any one of embodiments 1-176, comprising acquiring knowledge of or detecting the ALK fusion nucleic acid molecule or the ALK fusion polypeptide encoded by the ALK fusion nucleic acid molecule in a tissue biopsy sample, in a liquid biopsy sample, or in both a tissue biopsy sample and a liquid biopsy sample, from the individual.

[0736] Exemplary Embodiment 178: The method of any one of embodiments 4-11 and 51-177, wherein the acquiring knowledge of the ALK fusion nucleic acid molecule or the ALK fusion polypeptide encoded by the ALK fusion nucleic acid molecule comprises detecting the ALK fusion nucleic acid molecule or polypeptide in the sample.

[0737] Exemplary Embodiment 179: The method of any one of embodiments 1-3, 12-42, and 50-178, wherein detecting the ALK fusion nucleic acid molecule in the sample comprises detecting a fragment of the ALK fusion nucleic acid molecule comprising a breakpoint or fusion junction between the ALK gene, or the portion thereof, and the gene listed in Table 1, or the portion thereof.

[0738] Exemplary Embodiment 180: The method of any one of embodiments 1-3, 12-19, and 50-179, wherein the ALK fusion nucleic acid molecule is detected in the sample by one or more of: a nucleic acid hybridization assay, an amplification-based assay, a polymerase chain reaction-restriction fragment length polymorphism (PCR-RFLP) assay, real-time PCR, a screening analysis, fluorescence in situ hybridization (FISH), spectral karyotyping, multicolor FISH (mFISH), comparative genomic hybridization, in situ hybridization, sequence-specific priming (SSP) PCR, high-performance liquid chromatography (HPLC), mass-spectrometric genotyping, or sequencing.

[0739] Exemplary Embodiment 181: The method of embodiment 180, wherein the sequencing comprises a massively parallel sequencing (MPS) technique, whole genome sequencing (WGS), whole exome sequencing, targeted sequencing, direct sequencing, or a Sanger sequencing technique; and optionally wherein the massively parallel sequencing (MPS) technique comprises next-generation sequencing (NGS).

[0740] Exemplary Embodiment 182: The method of any one of embodiments 1-3, 12-19, and 50-178, wherein detecting the ALK fusion polypeptide comprises detecting a portion of the ALK fusion polypeptide that is encoded by a fragment of the ALK fusion nucleic acid molecule that comprises a breakpoint or fusion junction between the ALK gene, or the portion thereof, and the gene listed in Table 1, or the portion thereof.

[0741] Exemplary Embodiment 183: The method of any one of embodiments 1-3, 12-19, 50-178, and 182, wherein the ALK fusion polypeptide is detected in the sample by one or more of: immunoblotting, enzyme linked immunosorbent assay (ELISA), immunohistochemistry, or mass spectrometry.

[0742] Exemplary Embodiment 184: The method of any one of embodiments 1-3, 12-19, and 50-181, further comprising selectively enriching for one or more nucleic acids in the sample comprising nucleotide sequences corresponding to the ALK fusion nucleic acid molecule; wherein the selectively enriching produces an enriched sample.

[0743] Exemplary Embodiment 185: The method of embodiment 184, wherein the selectively enriching comprises: (a) combining one or more bait molecules with the sample, thereby hybridizing the one or more bait molecules to one or more nucleic acids in the sample comprising nucleotide sequences corresponding to the ALK fusion nucleic acid molecule and producing nucleic acid hybrids; and (b) isolating the nucleic acid hybrids to produce the enriched sample.

[0744] Exemplary Embodiment 186: The method of any one of embodiments 23, 29, 30, and 185, wherein the one or more bait molecules comprise a capture nucleic acid molecule configured to hybridize to a nucleotide sequence corresponding to the ALK fusion nucleic acid molecule.

[0745] Exemplary Embodiment 187: The method of embodiment 186, wherein the capture nucleic acid molecule comprises between about 10 and about 30 nucleotides, between about 50 and about 1000 nucleotides, between about 100 and about 500 nucleotides, between about 100 and about 300 nucleotides, or between about 100 and about 200 nucleotides.

[0746] Exemplary Embodiment 188: The method of any one of embodiments 23, 29, 30, and 185-187, wherein the one or more bait molecules are conjugated to an affinity reagent or to a detection reagent.

[0747] Exemplary Embodiment 189: The method of embodiment 188, wherein the affinity reagent is an antibody, an antibody fragment, or biotin, or wherein the detection reagent is a fluorescent marker.

[0748] Exemplary Embodiment 190: The method of any one of embodiments 186-189, wherein the capture nucleic acid molecule comprises a DNA, RNA, or mixed DNA/RNA molecule.

[0749] Exemplary Embodiment 191: The method of embodiment 24 or embodiment 184, wherein the selectively enriching comprises amplifying the one or more nucleic acid molecules comprising nucleotide sequences corresponding to the ALK fusion nucleic acid molecule using a polymerase chain reaction (PCR) to produce an enriched sample.

[0750] Exemplary Embodiment 192: The method of any one of embodiments 184-191, further comprising sequencing the enriched sample.

[0751] Exemplary Embodiment 193: The method of any one of embodiments 1-192, further comprising acquiring knowledge of or detecting in a sample from the individual a base substitution, a short insertion/deletion (indel), a copy number alteration, or a genomic rearrangement in one or more genes.

[0752] Exemplary Embodiment 194: The method of any one of embodiments 1-193, wherein the individual is a human.

[0753] Exemplary Embodiment 195: A kit comprising a probe or bait for detecting an ALK fusion nucleic acid molecule comprising a fusion between an ALK gene, or a portion thereof, and a gene listed in Table 1, or a portion thereof.

[0754] Exemplary Embodiment 196: A nucleic acid encoding an ALK fusion nucleic acid molecule, or a fragment thereof, comprising a fusion between an ALK gene, or a portion thereof, and a gene listed in Table 1, or a portion thereof.

[0755] Exemplary Embodiment 197: A vector comprising the nucleic acid of embodiment 196.

[0756] Exemplary Embodiment 198: A host cell comprising the vector of embodiment 197.

[0757] Exemplary Embodiment 199: An antibody or antibody fragment that specifically binds to an ALK fusion polypeptide, or to a portion thereof, wherein the ALK fusion polypeptide is encoded by an ALK fusion nucleic acid molecule comprising a fusion between an ALK gene, or a portion thereof, and a gene listed in Table 1, or a portion thereof.

[0758] Exemplary Embodiment 200: A kit comprising the antibody or antibody fragment of embodiment 199.

[0759] Exemplary Embodiment 201: In vitro use of one or more oligonucleotides for detecting an ALK fusion nucleic acid molecule comprising a fusion between an ALK gene, or a portion thereof, and a gene listed in Table 1, or a portion thereof.

[0760] Exemplary Embodiment 202: A kit comprising one or more oligonucleotides for detecting an ALK fusion nucleic acid molecule comprising a fusion between an ALK gene, or a portion thereof, and a gene listed in Table 1, or a portion thereof.

[0761] Exemplary Embodiment 203: A system, comprising:
[0762] a memory configured to store one or more program instructions; and
[0763] one or more processors configured to execute the one or more program instructions, the one or more program instructions when executed by the one or more processors are configured to:
   [0764] (a) obtain a plurality of sequence reads of one or more nucleic acid molecules, wherein the one or more nucleic acid molecules are derived from a sample obtained from an individual;
   [0765] (b) analyze the plurality of sequence reads for the presence of an ALK fusion nucleic acid molecule comprising a fusion between an ALK gene, or a portion thereof, and a gene listed in Table 1, or a portion thereof; and
   [0766] (c) detect, based on the analyzing, the ALK fusion nucleic acid molecule in the sample.

[0767] Exemplary Embodiment 204: A non-transitory computer readable storage medium comprising one or more programs executable by one or more computer processors for performing a method, comprising:
[0768] (a) obtaining, using the one or more processors, a plurality of sequence reads of one or more nucleic acid molecules, wherein the one or more nucleic acid molecules are derived from a sample obtained from an individual;
[0769] (b) analyzing, using the one or more processors, the plurality of sequence reads for the presence of an ALK fusion nucleic acid molecule comprising a fusion between an ALK gene, or a portion thereof, and a gene listed in Table 1, or a portion thereof; and
[0770] (c) detecting, using the one or more processors and based on the analyzing, the ALK fusion nucleic acid molecule in the sample.

[0771] Exemplary Embodiment 205: The system of embodiment 203, or the non-transitory computer readable storage medium of embodiment 204, wherein the sample is from an individual having a cancer.

[0772] Exemplary Embodiment 206: The system of embodiment 203 or embodiment 205, or the non-transitory computer readable storage medium of embodiment 204 or embodiment 205, wherein the plurality of sequence reads is obtained by sequencing, whole exome sequencing, whole genome sequencing, gene-targeted sequencing, or next-generation sequencing.

[0773] Exemplary Embodiment 207: The system of any one of embodiments 203 and 205-206, or the non-transitory computer readable storage medium of any one of embodiments 204-206, wherein the ALK fusion nucleic acid molecule is an ALK fusion nucleic acid molecule listed in Table 2, and wherein the order of the genes in the fusion in the 5′ to 3′ direction is as listed in Table 2.

[0774] Exemplary Embodiment 208: The system of any one of embodiments 203 and 205-207, or the non-transitory computer readable storage medium of any one of embodiments 204-207, wherein the ALK fusion nucleic acid molecule is an ALK fusion nucleic acid molecule listed in Table 3, and wherein the ALK fusion nucleic acid molecule comprises or results from a corresponding 5′ breakpoint and/or 3′ breakpoint within the exons or introns as listed in Table 3.

[0775] Exemplary Embodiment 209: The system of any one of embodiments 203 and 205-208, or the non-transitory computer readable storage medium of any one of embodiments 204-208, wherein the ALK fusion nucleic acid molecule is an ALK fusion nucleic acid molecule listed in Table 4, and wherein the ALK fusion nucleic acid molecule comprises or results from a corresponding 5′ breakpoint within the chromosomal coordinates as listed in Table 4, and/or a corresponding 3′ breakpoint within the chromosomal coordinates as listed in Table 4.

[0776] Exemplary Embodiment 210: The system of any one of embodiments 203 and 205-209, or the non-transitory computer readable storage medium of any one of embodiments 204-209, wherein the ALK fusion nucleic acid molecule is an ALK fusion nucleic acid molecule listed in Table 5, and wherein the ALK fusion nucleic acid molecule comprises or results from a fusion of a corresponding 5′ exon as listed in Table 5, or a portion thereof, fused to a corresponding 3′ exon as listed in Table 5, or a portion thereof.

[0777] Exemplary Embodiment 211: The system of any one of embodiments 203 and 205-210, or the non-transitory computer readable storage medium of any one of embodiments 204-210, wherein the ALK fusion nucleic acid molecule is an ALK fusion nucleic acid molecule listed in Table 6, and wherein the ALK fusion nucleic acid molecule comprises, in the 5′ to 3′ direction, the corresponding exons or portions thereof as listed in Table 6.

[0778] Exemplary Embodiment 212: The system of any one of embodiments 203 and 205-211, or the non-transitory computer readable storage medium of any one of embodiments 204-211, wherein the ALK fusion nucleic acid molecule is an ALK fusion nucleic acid molecule listed in Table 7, and wherein the ALK fusion nucleic acid molecule comprises a corresponding nucleotide sequence as listed in Table 7, or a nucleotide sequence with at least about 70% homology thereto.

[0779] Exemplary Embodiment 213: The system of any one of embodiments 203 and 205-212, or the non-transitory computer readable storage medium of any one of embodiments 204-212, wherein the ALK fusion nucleic acid molecule encodes an ALK fusion polypeptide.

[0780] Exemplary Embodiment 214: The system of any one of embodiments 203 and 205-213, or the non-transitory computer readable storage medium of any one of embodiments 204-213, wherein the ALK fusion nucleic acid molecule comprises a nucleotide sequence encoding an ALK fusion polypeptide that comprises an amino acid sequence as listed in Table 8, or an amino acid sequence with at least about 70% homology thereto.

[0781] Exemplary Embodiment 215: The system or the non-transitory computer readable storage medium of any one of embodiments 213-214, wherein the encoded ALK fusion polypeptide comprises an ALK kinase domain, or a fragment of an ALK kinase domain, having ALK kinase activity.

[0782] Exemplary Embodiment 216: The system or the non-transitory computer readable storage medium of any one of embodiments 213-215, wherein the encoded ALK fusion polypeptide has ALK kinase activity.

[0783] Exemplary Embodiment 217: The system or the non-transitory computer readable storage medium of any one of embodiments 213-216, wherein the encoded ALK fusion polypeptide has a constitutive ALK kinase activity.

[0784] Exemplary Embodiment 218: The system or the non-transitory computer readable storage medium of any one of embodiments 213-217, wherein the encoded ALK fusion polypeptide is oncogenic.

[0785] Exemplary Embodiment 219: The system or the non-transitory computer readable storage medium of any one of embodiments 213-218, wherein the encoded ALK fusion polypeptide promotes cancer cell survival, angiogenesis, cancer cell proliferation, and any combination thereof.

[0786] Exemplary Embodiment 220: The system or the non-transitory computer readable storage medium of any one of embodiments 213-219, wherein the encoded ALK fusion polypeptide is capable of dimerizing with an ALK polypeptide or with another ALK fusion polypeptide in a cancer cell.

[0787] Exemplary Embodiment 221: The system or the non-transitory computer readable storage medium of any one of embodiments 213-220, wherein the encoded ALK fusion polypeptide is an ALK fusion polypeptide listed in Table 8, and wherein the encoded ALK fusion polypeptide comprises a corresponding amino acid sequence as listed in Table 8, or an amino acid sequence with at least about 70% homology thereto.

[0788] Exemplary Embodiment 222: The system or the non-transitory computer readable storage medium of any one of embodiments 205-221, wherein the cancer is a carcinoma, a sarcoma, a lymphoma, a leukemia, a myeloma, a germ cell cancer, or a blastoma.

[0789] Exemplary Embodiment 223: The system or the non-transitory computer readable storage medium of any one of embodiments 205-222, wherein the cancer is a solid tumor.

[0790] Exemplary Embodiment 224: The system or the non-transitory computer readable storage medium of any one of embodiments 205-222, wherein the cancer is a hematologic malignancy.

[0791] Exemplary Embodiment 225: The system or the non-transitory computer readable storage medium of any one of embodiments 205-222, wherein the cancer is a lymphoma.

[0792] Exemplary Embodiment 226: The system or the non-transitory computer readable storage medium of any one of embodiments 205-222, wherein the cancer is a non-small cell lung carcinoma, a leiomyosarcoma, a thyroid carcinoma, a colorectal cancer, a pancreatic cancer, or a malignant peritoneal mesothelioma.

[0793] Exemplary Embodiment 227: The system or the non-transitory computer readable storage medium of any one of embodiments 205-222, wherein the cancer is a B cell cancer, a melanoma, breast cancer, lung cancer, bronchus cancer, colorectal cancer, prostate cancer, pancreatic cancer, stomach cancer, ovarian cancer, urinary bladder cancer, brain cancer, central nervous system cancer, peripheral nervous system cancer, esophageal cancer, cervical cancer, uterine cancer, endometrial cancer, cancer of an oral cavity, cancer of a pharynx, liver cancer, kidney cancer, testicular cancer, biliary tract cancer, small bowel cancer, appendix cancer, salivary gland cancer, thyroid gland cancer, adrenal gland cancer, osteosarcoma, chondrosarcoma, a cancer of hematological tissue, an adenocarcinoma, an inflammatory myofibroblastic tumor, a gastrointestinal stromal tumor (GIST), colon cancer, multiple myeloma (MM), myelodysplastic syndrome (MDS), myeloproliferative disorder (MPD), acute lymphocytic leukemia (ALL), acute myelocytic leukemia (AML), chronic myelocytic leukemia (CML), chronic lymphocytic leukemia (CLL), polycythemia Vera, Hodgkin lymphoma, non-Hodgkin lymphoma (NHL), soft-tissue sarcoma, fibrosarcoma, myxosarcoma, liposarcoma, osteogenic sarcoma, chordoma, angiosarcoma, endotheliosarcoma, lymphangiosarcoma, lymphangioendotheliosarcoma, synovioma, mesothelioma, Ewing's tumor, leiomyosarcoma, rhabdomyosarcoma, squamous cell carcinoma, basal cell carcinoma, adenocarcinoma, sweat gland carcinoma, sebaceous gland carcinoma, papillary carcinoma, papillary adenocarcinomas, medullary carcinoma, bronchogenic carcinoma, renal cell carcinoma, hepatoma, bile duct carcinoma, choriocarcinoma, seminoma, embryonal carcinoma, Wilms' tumor, bladder carcinoma, epithelial carcinoma, glioma, astrocytoma, medulloblastoma, craniopharyngioma, ependymoma, pinealoma, hemangioblastoma, acoustic neuroma, oligodendroglioma, meningioma, neuroblastoma, retinoblastoma, follicular lymphoma, diffuse large B-cell lymphoma, mantle cell lymphoma, hepatocellular carcinoma, thyroid cancer, gastric cancer, head and neck cancer, small cell cancer, essential thrombocythemia, agnogenic myeloid metaplasia, hypereosinophilic syndrome, systemic mastocytosis, familiar hypereosinophilia, chronic eosinophilic leukemia, neuroendocrine cancers, or a carcinoid tumor.

[0794] Exemplary Embodiment 228: The system or the non-transitory computer readable storage medium of any one of embodiments 205-222, wherein the cancer is an anus squamous cell carcinoma, brain glioblastoma (GBM), breast cancer, breast carcinoma, breast invasive ductal carcinoma (IDC), colon adenocarcinoma (CRC), esophagus adenocarcinoma, fallopian tube serous carcinoma, gallbladder adenocarcinoma, gallbladder carcinoma, gastroesophageal junction adenocarcinoma, lung adenocarcinoma, lung non-small cell lung carcinoma, lung non-small cell lung carcinoma, lymph node Castleman's disease, lymph node lymphoma T-cell, ovary clear cell carcinoma, ovary endometrioid adenocarcinoma, ovary epithelial carcinoma, ovary high grade serous carcinoma, ovary serous carcinoma, pancreas cancer, pancreas ductal adenocarcinoma, pediatric bone osteosarcoma, bone osteosarcoma, pediatric skin melanoma, skin melanoma, pediatric soft tissue sarcoma, soft tissue sarcoma, pediatric soft tissue sarcoma undifferentiated, soft tissue sarcoma undifferentiated, peritoneum serous carcinoma, prostate acinar adenocarcinoma, small intestine adenocarcinoma, soft tissue leiomyosarcoma, soft tissue liposarcoma, thyroid papillary carcinoma, unknown primary adenocarcinoma, unknown primary carcinoma, unknown primary malignant neoplasm, unknown primary myoepithelial carcinoma, uterus carcinosarcoma, uterus endometrial adenocarcinoma endometrioid, uterus leiomyosarcoma, or vulva squamous cell carcinoma (SCC).

[0795] Exemplary Embodiment 229: The system or the non-transitory computer readable storage medium of any one of embodiments 207-222, wherein the ALK fusion nucleic acid molecule is an ALK fusion nucleic acid molecule listed in Table 9, or the encoded ALK fusion polypeptide is an ALK fusion polypeptide listed in Table 9, and wherein the cancer is the corresponding cancer as listed in Table 9.

[0796] Exemplary Embodiment 230: The system of any one of embodiments 203 and 205-229, or the non-transitory computer readable storage medium of any one of embodiments 204-229, wherein the plurality of sequence reads is obtained by sequencing; optionally wherein the sequencing comprises use of a massively parallel sequencing (MPS) technique, whole genome sequencing (WGS), whole exome sequencing, targeted sequencing, direct sequencing, or a Sanger sequencing technique; and optionally wherein the massively parallel sequencing technique comprises next generation sequencing (NGS).

[0797] Exemplary Embodiment 231: The system of any one of embodiments 203 and 205-230, wherein the one or more program instructions when executed by the one or more processors are further configured to generate, based at least in part on the detecting, a molecular profile for the sample.

[0798] Exemplary Embodiment 232: The non-transitory computer readable storage medium of any one of embodiments 204-230, wherein the method further comprises generating, based at least in part on the detecting, a molecular profile for the sample.

[0799] Exemplary Embodiment 233: The system of embodiment 231, or the non-transitory computer readable storage medium of embodiment 232, wherein the individual is administered a treatment based at least in part on the molecular profile.

[0800] Exemplary Embodiment 234: The system of embodiment 231 or embodiment 233, or the non-transitory computer readable storage medium of embodiment 232 or embodiment 233, wherein the treatment comprises an ALK-targeted therapy.

[0801] Exemplary Embodiment 235: The system of any one of embodiments 231 and 233-234, or the non-transitory computer readable storage medium of any one of embodiments 232-234, wherein the molecular profile further comprises results from a comprehensive genomic profiling (CGP) test, a gene expression profiling test, a cancer hotspot panel test, a DNA methylation test, a DNA fragmentation test, an RNA fragmentation test, or any combination thereof.

[0802] Exemplary Embodiment 236: The system of any one of embodiments 231 and 233-235, or the non-transitory computer readable storage medium of any one of embodiments 232-235, wherein the molecular profile further comprises results from a nucleic acid sequencing-based test.

[0803] Exemplary Embodiment 237: An ALK-targeted therapy for use in a method of treating or delaying progression of cancer, wherein the method comprises administering the ALK-targeted therapy to an individual, wherein:
[0804] (a) an ALK fusion nucleic acid molecule comprising a fusion between an ALK gene, or a portion thereof, and a gene listed in Table 1, or a portion thereof, or
[0805] (b) an ALK fusion polypeptide encoded by the ALK fusion nucleic acid molecule, is detected in a sample obtained from the individual.

[0806] Exemplary Embodiment 238: An ALK-targeted therapy for use in the manufacture of a medicament for treating or delaying progression of cancer, wherein the medicament is to be administered to an individual, wherein:
[0807] (a) an ALK fusion nucleic acid molecule comprising a fusion between an ALK gene, or a portion thereof, and a gene listed in Table 1, or a portion thereof, or
[0808] (b) an ALK fusion polypeptide encoded by the ALK fusion nucleic acid molecule, is detected in a sample obtained from the individual.

[0809] The method steps of the invention(s) described herein are intended to include any suitable method of causing one or more other parties or entities to perform the steps, unless a different meaning is expressly provided or otherwise clear from the context. Such parties or entities need not be under the direction or control of any other party or entity, and need not be located within a particular jurisdiction. Thus, for example, a description or recitation of “adding a first number to a second number” includes causing one or more parties or entities to add the two numbers together. For example, if person X engages in an arm's length transaction with person Y to add the two numbers, and person Y indeed adds the two numbers, then both persons X and Y perform the step as recited: person Y by virtue of the fact that he actually added the numbers, and person X by virtue of the fact that he caused person Y to add the numbers. Furthermore, if person X is located within the United States and person Y is located outside the United States, then the method is performed in the United States by virtue of person X's participation in causing the step to be performed.

[0810] The terminology used in the description of the various described embodiments herein is for the purpose of describing particular embodiments only and is not intended to be limiting. As used in the description of the various described embodiments and the appended claims, the singular forms “a,” “an,” and “the” are intended to include the plural forms as well, unless the context clearly indicates otherwise. It will also be understood that the term “and/or” as used herein refers to and encompasses any and all possible combinations of one or more of the associated listed items. It will be further understood that the terms “includes,” “including,” “comprises,” and/or “comprising,” when used in this specification, specify the presence of stated features, integers, steps, operations, elements, and/or components, but do not preclude the presence or addition of one or more other features, integers, steps, operations, elements, components, and/or groups thereof.

[0811] The specification is considered to be sufficient to enable one skilled in the art to practice the invention. Various modifications of the invention in addition to those shown and described herein will become apparent to those skilled in the art from the foregoing description and fall within the scope of the appended claims. All publications, patents, and patent applications cited herein are hereby incorporated by reference in their entirety for all purposes. To the extent that any reference incorporated by reference conflicts with the instant disclosure, the instant disclosure shall control.

### EXAMPLES

[0812] The invention will be more fully understood by reference to the following examples. They should not, however, be construed as limiting the scope of the invention. It is understood that the examples and embodiments described herein are for illustrative purposes only and that various modifications or changes in light thereof will be suggested to persons skilled in the art and are to be included within the spirit and purview of this application and scope of the appended claims.

### Example 1: Pan-Cancer Landscape of ALK Gene Fusions

[0813] The anaplastic lymphoma kinase (ALK) gene encodes a receptor tyrosine kinase. ALK is a member of the insulin receptor superfamily. Its activation induces downstream pathways associated with cell survival, angiogenesis, and cell proliferation (Grande et al., Molecular cancer therapeutics, vol. 10, 4 (2011): 569-79). Gene fusions involving the ALK gene have been identified as being oncogenic (see, e.g., Hallberg et al., Annals of oncology, vol. 27 Suppl 3 (2016): iii4-iii15), and may confer sensitivity of cancer to certain anti-cancer therapies such as ALK inhibitors and other ALK-targeted therapies.

[0814] This Example describes a comprehensive characterization of the pan-cancer landscape of gene fusions involving the anaplastic lymphoma kinase (ALK).

[0815] ALK gene fusions were identified in samples from patients with various cancer types using comprehensive genomic profiling (CGP), see, e.g., Frampton, G. M., et al. (2013) Nat. Biotechnol. 31(11):1023-31. As shown in Table 10, ALK gene fusions involving numerous gene fusion partners were identified.

TABLE 10
ALK gene fusions.

| Fusion | | Number of |
|---|---|---|
| Number | Fusion | Cases Identified |
| 1 | ALK-AGAP1 | 2 |
| 2 | ALK-COL3A1 | 2 |
| 3 | ALK-KIF5C | 1 |
| 4 | ALK-LRRFIP2 | 2 |
| 5 | ALK-MYO5C | 2 |
| 6 | ALK-SRSF7 | 2 |
| 7 | ALK-ABCB11 | 1 |
| 8 | ALK-ACTN4 | 1 |
| 9 | ALK-APH1A | 1 |
| 10 | ALK-AZI2 | 1 |
| 11 | ALK-BTBD9 | 1 |
| 12 | ALK-C2orf73 | 1 |
| 13 | ALK-CAPN14 | 1 |
| 14 | ALK-CARMIL1 | 1 |
| 15 | ALK-CASP8 | 1 |
| 16 | ALK-CDC42BPA | 1 |
| 17 | ALK-CIB4 | 1 |
| 18 | ALK-CNTNAP5 | 1 |
| 19 | ALK-CPQ | 1 |
| 20 | ALK-CPSF7 | 1 |
| 21 | ALK-CREBBP | 1 |
| 22 | ALK-CTBP1 | 1 |
| 23 | ALK-CTNND1 | 1 |
| 24 | ALK-CYP51A1 | 1 |
| 25 | ALK-CYS1 | 1 |
| 26 | ALK-EPHA2 | 1 |
| 27 | ALK-FHOD3 | 1 |
| 28 | ALK-FILIP1L | 1 |
| 29 | ALK-GMCL1 | 1 |
| 30 | ALK-GPN1 | 1 |
| 31 | ALK-GPR113 | 1 |
| 32 | ALK-HADHA | 1 |
| 33 | ALK-HS1BP3 | 1 |
| 34 | ALK-INTS9 | 1 |
| 35 | ALK-ITGA6 | 1 |
| 36 | ALK-KCTD18 | 1 |
| 37 | ALK-KLC4 | 1 |
| 38 | ALK-LINC00535 | 1 |
| 39 | ALK-MAGOHB | 1 |
| 40 | ALK-MAMDC4 | 1 |
| 41 | ALK-MANBA | 1 |
| 42 | ALK-MAP3K9 | 1 |
| 43 | ALK-MED13L | 1 |
| 44 | ALK-METTL25 | 1 |
| 45 | ALK-MTBP | 1 |
| 46 | ALK-MYH10 | 1 |
| 47 | ALK-NFIA | 1 |
| 48 | ALK-NINJ2 | 1 |
| 49 | ALK-OPRM1 | 1 |
| 50 | ALK-OTX1 | 1 |
| 51 | ALK-PAQR4 | 1 |
| 52 | ALK-PDCD10 | 1 |
| 53 | ALK-PDE3A | 1 |
| 54 | ALK-PELI1 | 1 |
| 55 | ALK-PLEC | 1 |
| 56 | ALK-PTGER4 | 1 |
| 57 | ALK-PTPRJ | 1 |
| 58 | ALK-QKI | 1 |
| 59 | ALK-RPS6KA5 | 1 |
| 60 | ALK-SASH1 | 1 |
| 61 | ALK-SEC16B | 1 |
| 62 | ALK-SKAP1 | 1 |
| 63 | ALK-SLC25A13 | 1 |
| 64 | ALK-SLC30A6 | 1 |
| 65 | ALK-SNX17 | 1 |
| 66 | ALK-SOX13 | 1 |
| 67 | ALK-TANGO6 | 1 |
| 68 | ALK-TG | 1 |
| 69 | ALK-TMCO3 | 1 |
| 70 | ALK-TNS3 | 1 |
| 71 | ALK-TRIM24 | 1 |
| 72 | ALK-TTC28 | 1 |
| 73 | ALK-UBE2L3 | 1 |
| 74 | ALK-UBE3B | 1 |
| 75 | ALK-UTRN | 1 |
| 76 | ALK-VASP | 1 |
| 77 | ALK-WDR92 | 1 |
| 78 | ALK-YPEL5 | 1 |
| 79 | ALK-ZNF446 | 1 |
| 80 | ALK-ZNF454 | 1 |
| 81 | ALK-ZNF513 | 1 |
| 82 | ALK-ZSWIM2 | 1 |

[0816] As shown in Table 11, detailed characterization of the identified ALK gene fusions revealed that the fusions were present in diverse cancer types, with various fusion partner genes and breakpoints.

TABLE 11
Detailed Characteristics of ALK Gene Fusions.

| Fusion | 5′ breakpoint/ | | Fusion transcript |
|---|---|---|---|
| Exon and breakpoint | 3′ breakpoint/ | | sequence |
| information | 5′ Exons/ | 5′ Refseq ID/ | Fusion protein |
| Tumor type | 3′ Exons/ | 3′ Refseq ID/ | sequence |
| ALK-COL3A1 | chr2: 189873851- | NM_000090/ | SEQ ID NO: 1 |
| 5′-COL3A1(ex1-48 | 18987389/ | NM_004304 | |
| NM_000090)-ALK | chr2: 29448329- | | SEQ ID NO: 44 |
| (ex19-29 NM_004304). | 29448369 | | |
| Breakpoints COL3A1 | COL3A1 ex1-48/ | | |
| intron 48, ALK intron 18. | ALK ex19-29 | | |
| Reciprocal: no | | | |
| Soft tissue sarcoma (NOS) | | | |
| In frame fusion, includes | | | |
| ALK kinase domain. | | | |
| ALK-CDC42BPA | chr1: 227258447- | NM_003607/ | SEQ ID NO: 2 |
| 5′-CDC42BPA(ex1-20 | 227258641/ | NM_004304 | |
| NM_003607)-ALK | chr2: 29447175- | | SEQ ID NO: 45 |
| (ex20-29 NM_004304). | 29447325 | | |
| Breakpoints CDC42BPA | CDC42BPA | | |
| intron 20, ALK intron 19 | ex1-20/ALK | | |
| Ovary serous carcinoma | ex20-29 | | |
| In frame fusion, includes | | | |
| ALK kinase domain. | | | |
| ALK-EPHA2 | chr1: 16473032- | NM_004431/ | SEQ ID NO: 3 |
| 5′-EPHA2(ex1-3 | 16473610/ | NM_004304 | |
| NM_004431)-ALK | chr2: 29449267- | | SEQ ID NO: 46 |
| (ex19-29 NM_004304). | 29449791 | | |
| Breakpoints ALK intron | EPHA2 ex1-3/ | | |
| 18, EPHA2 intron 3. | ALK ex19-29 | | |
| Reciprocal: yes | | | |
| Colon adenocarcinoma | | | |
| (CRC) | | | |
| In frame fusion, includes | | | |
| ALK kinase domain. | | | |
| ALK-MYO5C | chr15: 52513187- | NM_018728/ | SEQ ID NO: 4 |
| 5′-MYO5C (ex1-30 | 52513409/ | NM_004304 | |
| NM_018728)-ALK | chr2:29447042- | | SEQ ID NO: 47 |
| (ex20-29 NM_004304). | 29447276 | | |
| Breakpoints in MYO5C | MYO5C ex1-30/ | | |
| intron 30 and ALK intron | ALK ex20-29 | | |
| 19 | | | |
| Lung adenocarcinoma | | | |
| In frame fusion, includes | | | |
| ALK kinase domain. | | | |
| ALK-TRIM24 | chr7: 138259438- | NM_003852/ | SEQ ID NO: 5 |
| 5′-TRIM24(ex1-12 | 138259669/ | NM_004304 | |
| NM_003852)-ALK | chr2: 29447383- | | SEQ ID NO: 48 |
| (ex20-29 NM_004304). | 29447690 | | |
| Breakpoints TRIM24 | TRIM24 ex1-12/ | | |
| intron 12, ALK intron 19 | ALK ex20-29 | | |
| Lung adenocarcinoma | | | |
| In frame fusion, includes | | | |
| ALK kinase domain. | | | |
| ALK-SKAP1 | chr17: 46426149- | NM_003726/ | SEQ ID NO: 6 |
| 5′-SKAP1(ex1-3 | 46426398/ | NM_004304 | |
| NM_003726)-ALK | chr2: 29446499- | | SEQ ID NO: 49 |
| (ex20-29 NM_004304). | 29446749 | | |
| Breakpoints SKAP1 | SKAP1 ex1-3/ | | |
| intron 3, ALK intron 19 | ALK ex20-29 | | |
| Ovary endometrioid | | | |
| adenocarcinoma | | | |
| In frame fusion, includes | | | |
| ALK kinase domain. | | | |
| ALK-UBE3B | chr12: 109937277- | NM_130466/ | SEQ ID NO: 7 |
| 5′-UBE3B(ex1-11 | 109937406/ | NM_004304 | |
| NM_130466)-ALK | chr2: 29446869- | | SEQ ID NO: 50 |
| (ex20-29 NM_004304). | 29447287 | | |
| Breakpoints UBE3B | UBE3B ex1-11/ | | |
| intron 11, ALK intron 19. | ALK ex20-29 | | |
| Lung adenocarcinoma | | | |
| In frame fusion, includes | | | |
| ALK kinase domain. | | | |
| ALK-TNS3 | chr7: 47333336- | NM_022748/ | SEQ ID NO: 8 |
| 5′-TNS3(ex1-25 | 47333376/ | NM_004304 | |
| NM_022748)-ALK | chr2: 29446279- | | SEQ ID NO: 51 |
| (ex20-29 NM_004304). | 29446319 | | |
| Breakpoints TNS3 intron | TNS3 ex1-25/ | | |
| 25, ALK intron 19. | ALK ex20-29 | | |
| Reciprocal: no | | | |
| Lymph node Castleman’s | | | |
| disease | | | |
| In frame fusion, includes | | | |
| ALK kinase domain. | | | |
| ALK-C2orf73 | chr2: 54571576- | NM_001100396/ | SEQ ID NO: 9 |
| 5′-C2orf73(ex1-3 | 54571912/ | NM_004304 | |
| NM_001100396)-ALK | chr2: 29447055- | | SEQ ID NO: 52 |
| (ex20-29 NM_004304). | 29447357 | | |
| Breakpoints C2orf73 | C2orf73 ex1-3/ | | |
| intron 3, ALK intron 19 | ALK ex20-29 | | |
| Lung adenocarcinoma | | | |
| In frame fusion, includes | | | |
| ALK kinase domain. | | | |
| ALK-AZI2 | chr3: 28367651- | NM_022461/ | SEQ ID NO: 10 |
| 5′-AZI2(ex1-7 | 28368004/ | NM_004304 | |
| NM_022461)-ALK | chr2: 29446143- | | SEQ ID NO: 53 |
| (ex20-29 NM_004304). | 29446537 | | |
| Breakpoints AZI2 intron | AZI2 ex1-7/ | | |
| 7, ALK intron 19. | ALK ex20-29 | | |
| Reciprocal: no | | | |
| Gastroesophageal junction | | | |
| adenocarcinoma | | | |
| In frame fusion, includes | | | |
| ALK kinase domain. | | | |
| ALK-MANBA | chr4: 103560841- | NM_005908/ | SEQ ID NO: 11 |
| 5′-MANBA(ex1-14 | 103561084/ | NM_004304 | |
| NM_005908)-ALK | chr2: 29447666- | | SEQ ID NO: 54 |
| (ex20-29 NM_004304). | 29447971 | | |
| Breakpoints MANBA | MANBA ex1-14/ | | |
| intron 14, ALK intron 19. | ALK ex20-29 | | |
| Lung adenocarcinoma | | | |
| In frame fusion, includes | | | |
| ALK kinase domain. | | | |
| ALK-CNTNAP5 | chr2: 124982770- | NM_130773/ | SEQ ID NO: 12 |
| 5′-CNTNAP(ex1-2 | 124983057/ | NM_004304 | |
| NM_130773)-ALK | chr2: 29447716- | | SEQ ID NO: 55 |
| (ex20-29 NM_004304). | 29448231 | | |
| Breakpoints CNTNAP5 | CNTNAP5 ex1-2/ | | |
| intron 2, ALK intron 19. | ALK ex20-29 | | |
| Reciprocal: no. | | | |
| Lung adenocarcinoma | | | |
| In frame fusion, includes | | | |
| ALK kinase domain. | | | |
| ALK-TANGO6 | chr16: 68877512- | NM_024562/ | SEQ ID NO: 14 |
| 5′-TANGO6(ex1-1 | 68877552 | NM_004304 | |
| NM_024562)-ALK | chr2: 29940445- | | SEQ ID NO: 57 |
| (ex2-29 NM_004304). | 29940485 | | |
| Breakpoints TANGO6 | TANGO6 ex1-1/ | | |
| intron 1, ALK intron 1. | ALK ex2-29 | | |
| Soft tissue sarcoma | | | |
| undifferentiated | | | |
| In frame fusion, includes | | | |
| ALK kinase domain. | | | |
| ALK-NFIA | chr1: 61554202- | NM_005595/ | SEQ ID NO: 15 |
| 5′-NFIA(ex1-2 | 61554242/ | NM_004304 | |
| NM_005595)-ALK | chr2: 29917777- | | SEQ ID NO: 58 |
| (ex2-29 NM_004304). | 29917817 | | |
| Breakpoints NFIA | NFIA ex1-2/ | | |
| intron 2, ALK intron 1. | ALK ex2-29 | | |
| Reciprocal: no. | | | |
| Soft tissue liposarcoma | | | |
| In frame fusion, includes | | | |
| ALK kinase domain. | | | |
| ALK-RPS6KA5 | chr14: 91489071- | NM_004755/ | SEQ ID NO: 16 |
| 5′-RPS6KA5(ex1-1 | 91489199/ | NM_004304 | |
| NM_004755)-ALK | chr2: 29541078- | | SEQ ID NO: 59 |
| (ex8-29 NM_004304). | 29541335 | | |
| Breakpoints RPS6KA5 | RPS6KA5 ex1-1/ | | |
| intron 1, ALK intron 7 | ALK ex8-29 | | |
| Pertoneum serous | | | |
| carcinoma | | | |
| In frame fusion, includes | | | |
| ALK kinase domain. | | | |
| ALK-TG | chr8: 133902377- | NM_003235/ | SEQ ID NO: 17 |
| 5′-TG(ex1-10 | 133902916/ | NM_004304 | |
| NM_003235)-ALK | chr2: 29449335- | | SEQ ID NO: 60 |
| (ex19-29 NM_004304). | 29449926 | | |
| Breakpoints ALK intron | TG ex1-10/ | | |
| 18, TG intron 10. | ALK ex19-29 | | |
| Reciprocal: yes | | | |
| Thyroid papillary | | | |
| carcinoma | | | |
| In frame fusion, includes | | | |
| ALK kinase domain. | | | |
| ALK-LRRFIP2 | chr3: 37098839- | NM_006309/ | SEQ ID NO: 18 |
| 5′-LRRFIP2(ex1-25 | 37099184/ | NM_004304 | |
| NM_006309)-ALK | chr2: 29447444- | | SEQ ID NO: 61 |
| (ex20-29 NM_004304). | 29447873 | | |
| Breakpoints LRRFIP2 | LRRFIP2 ex1-25/ | | |
| intron 25, ALK intron 19 | ALK ex20-29 | | |
| Lung non-small cell | | | |
| lung carcinoma (NOS) | | | |
| In frame fusion, includes | | | |
| ALK kinase domain. | | | |
| ALK-MYO5C | chr15: 52512435- | NM_018728/ | SEQ ID NO: 19 |
| 5′MYO5C(ex1-30 | 52512748/ | NM_004304 | |
| NM_018728)-ALK | chr2: 29447704- | | SEQ ID NO: 62 |
| (ex20-29 NM_004304). | 29448298 | | |
| Breakpoints MYO5C | | | |
| intron 30, ALK intron 19 | | | |
| Lung adenocarcinoma | | | |
| In frame fusion, includes | | | |
| ALK kinase domain. | | | |
| ALK-AGAP1 | chr2: 236691113- | NM_014914/ | SEQ ID NO: 20 |
| 5′-AGAP1(ex1-6 | 236691343/ | NM_004304 | |
| NM_014914)-ALK | chr2: 29449663- | | SEQ ID NO: 63 |
| (ex18-29 NM_004304). | 29449982 | | |
| Breakpoints AGAP1 | AGAP1 ex1-6/ | | |
| intron 6, ALK intron 17 | ALK ex18-29 | | |
| Unknown primary | | | |
| myoepithelial carcinoma | | | |
| In frame fusion, includes | | | |
| ALK kinase domain. | | | |
| ALK-MED13L | chr2: 30142862- | NM_004304/ | SEQ ID NO: 21 |
| 5′-ALK(ex1-1 | 30142902/ | NM_015335 | |
| NM_004304)-MED13L | chr12: 116457697- | | SEQ ID NO: 64 |
| (ex6-31 NM_015335). | 116457737 | | |
| Breakpoints ALK | ALK ex1-1/ | | |
| intron 1, MED13L | MED13L ex6-31 | | |
| intron 5. | | | |
| Reciprocal: no | | | |
| Pediactric soft tissue | | | |
| sarcoma undifferentiated | | | |
| In frame fusion. | | | |
| ALK-MTBP | chr2: 29450415- | NM_004304/ | SEQ ID NO: 22 |
| 5′-ALK(ex1-17 | 29450642/ | NM_022045 | |
| NM_004304)-MTBP | chr8: 121498376- | | SEQ ID NO: 65 |
| (ex12-22 NM_022045). | 121498554 | | |
| Breakpoints ALK | | | |
| intron 17, MTBP intron 11 | | | |
| Ovary serous carcinoma | | | |
| In frame fusion. | | | |
| ALK-SLC30A6 | chr2: 29449705- | NM_004304/ | SEQ ID NO: 24 |
| 5′-ALK(ex1-18 | 29450046/ | NM_017964 | |
| NM_004304)-SLC30A6 | chr2: 32400119- | | SEQ ID NO: 67 |
| (ex4-14 NM_017964). | 32400478 | | |
| Breakpoints ALK | ALK ex1-18/ | | |
| intron 18, SLC30A6 | SLC30A6 ex4-14 | | |
| intron 3 | | | |
| Lung non-small cell lung | | | |
| carcinoma (NOS) | | | |
| In frame fusion. | | | |
| ALK-GMCL1 | chr2: 29420355- | NM_004304/ | SEQ ID NO: 25 |
| 5′-ALK(ex1-27 | 29420535 | NM_178439 | |
| NM_004304)-GMCL1 | chr2: 70072839- | | SEQ ID NO: 68 |
| (ex7-14 NM_178439). | 70073051 | | |
| Breakpoints ALK | ALK ex1-27/ | | |
| intron 27, GMCL1 | GMCL1 ex7-14 | | |
| intron 6 | | | |
| Prostate acinar | | | |
| adenocarcinoma | | | |
| In frame fusion. | | | |
| AKA-AGAP1 | chr2: 29447436- | NM_004304/ | SEQ ID NO: 26 |
| 5′-ALK(ex1-19 | 29447953/ | NM_014914 | |
| NM_004304)-AGAP1 | chr2: 236681905- | | SEQ ID NO: 69 |
| (ex7-17 NM_014914). | 236682235 | | |
| Breakpoints ALK | ALK ex1-19/ | | |
| intron 19, AGAP1 intron 6. | AGAP1 ex7-17 | | |
| Lung adenocarcinoma | | | |
| In frame fusion. | | | |
| ALK-ZNF454 | chr2: 29446550- | NM_004304/ | SEQ ID NO: 27 |
| 5′-ALK(ex1-19 | 29446728/ | NM_182594 | |
| NM_004304)-ZNF454 | chr5: 17380665- | | SEQ ID NO: 70 |
| (ex5-5 NM_182594). | 178380839 | | |
| Breakpoints ALK intron | ALK ex1-19/ | | |
| 19, AGAP1 intron 6. | ZNF454 ex5-5 | | |
| Lung adenocarcinoma | | | |
| In frame fusion. | | | |
| ALK-TTC28 | chr22: 29070004- | NM_001145418/ | SEQ ID NO: 28 |
| 5′-TTC28(ex1-1 | 29070137/ | NM_004304 | |
| NM_001145418)-ALK | chr2: 29456365- | | SEQ ID NO: 71 |
| (ex14-299 NM_004304). | 29456651 | | |
| Breakpoints TTC28 | TTC28 ex1-1/ | | |
| intron 1, ALK intron 13. | ALK ex14-29 | | |
| Reciprocal no | | | |
| Uterus carcinosarcoma | | | |
| In frame fusion, includes | | | |
| ALK kinase domain. | | | |
| ALK-NINJ2 | chr12: 758744- | NM_016533/ | SEQ ID NO: 29 |
| 5′-NINJ2(ex1-1 | 759024/ | NM_004304 | |
| NM_016533)-ALK | chr2: 29456325- | | SEQ ID NO: 72 |
| (ex14-29 NM_004304). | 29456573 | | |
| Breakpoints NINJ2 | NINJ2 ex1-1/ | | |
| intron 1, ALK intron 13 | ALK ex14-29 | | |
| Breast invasive ductal | | | |
| carcinoma (IDC) | | | |
| In frame fusion, includes | | | |
| ALK kinase domain. | | | |
| ALK-UTRN | chr6: 145163819- | NM_007124/ | SEQ ID NO: 30 |
| 5′-UTRN(ex1-72 | 145164312/ | NM_004304 | |
| NM_007124)-ALK | chr2: 29448627- | | SEQ ID NO: 73 |
| (ex19-29 NM_004304). | 29449031 | | |
| Breakpoints UTRN | UTRN ex1-72/ | | |
| intron 72, ALK intron 18 | ALK ex19-29 | | |
| Pancreas ductal | | | |
| adenocarcinoma | | | |
| In frame fusion, includes | | | |
| ALK kinase domain. | | | |
| ALK-ACTN4 | chr19: 39200190- | NM_004924/ | SEQ ID NO: 31 |
| 5′-ACTN4(ex1-7 | 39200558 | NM_004304 | |
| NM_004924)-ALK | vhr2: 29446977- | | SEQ ID NO: 74 |
| (ex20-29 NM_004304). | 29447411 | | |
| Breakpoints ACTN4 | ACTN4 ex1-7/ | | |
| intron 7, ALK intron 19 | ALK ex20-29 | | |
| Lung adenocarcinoma | | | |
| In frame fusion, includes | | | |
| ALK kinase domain. | | | |
| ALK-CPSF7 | chr11: 61186432- | NM_024811/ | SEQ ID NO: 32 |
| 5′-CPSF7 (ex1-5 | 61186683/ | NM_004304 | |
| NM_024811)-ALK | chr2: 29447932- | | SEQ ID NO: 75 |
| (ex20-29). | 29448250 | | |
| Breakpoints in CPSF7 | CPSF7 ex1-5/ | | |
| intron 5 and ALK | ALK ex20-29 | | |
| intron 19. | | | |
| In frame fusion, includes | | | |
| ALK kinase domain. | | | |
| ALK-SLC25A13 | chr7: 95814076- | NM_014251/ | SEQ ID NO: 33 |
| 5′-ALC25A13(ex1-10 | 95814403/ | NM_004304 | |
| NM_014251)-ALK | chr2: 29446496- | | SEQ ID NO: 76 |
| (ex20-29 NM_004304). | 29446887 | | |
| Breakpoints SLC25A13 | SLC25A13 ex1-10/ | | |
| intron 10, ALK intron 19 | ALK ex20-29 | | |
| Lung adenocarcinoma | | | |
| In fusion frame, includes | | | |
| ALK kinase domain. | | | |
| ALK-CTNND1 | chr11: 57580664- | NM_001331/ | SEQ ID NO: 34 |
| 5′-CTNND1(ex1-16 | 57580962/ | NM_004304 | |
| NM_001331)-ALK | chr2: 29446968- | | SEQ ID NO: 77 |
| (ex20-x29 NM_004304). | 29447253 | | |
| Breakpoints CTNND1 | CTNND1 ex1-16/ | | |
| intron 16 and ALK | ALK ex20-29 | | |
| intron 19. | | | |
| Reciprocal: no | | | |
| Lung adenocarcinoma | | | |
| In frame fusion, includes | | | |
| ALK kinase domain. | | | |
| ALK-KLC4 | chr6: 43039012- | NM_201521/ | SEQ ID NO: 35 |
| 5′-KLC4(ex1-9 | 43039212/ | NM_004304 | |
| NM_201521)-ALK | chr2: 29447007- | | SEQ ID NO: 78 |
| (ex20-29 NM_004304). | 29447235 | | |
| Breakpoints KLC4 | KLC4 ex1-9/ | | |
| intron 9, ALK intron 19. | ALK ex20-29 | | |
| Lung adenocarcinoma | | | |
| In frame fusion, includes | | | |
| ALK kinase domain. | | | |
| ALK-BTBD9 | chr6: 38549536- | NM_052893/ | SEQ ID NO: 36 |
| 5′-BTBD9(ex1-5 | 38549796/ | NM_004304 | |
| NM_052893)-ALK | chr2: 29447685- | | SEQ ID NO: 79 |
| (ex20-29 NM_004304). | 29447981 | | |
| Breakpoints BTBD9 | BTBD9 ex1-5/ | | |
| intron 5, ALK intron 19. | ALK ex20-29 | | |
| Lung non-small cell | | | |
| lung carcinoma (NOS) | | | |
| In frame fusion, includes | | | |
| ALK kinase domain. | | | |
| ALK-CPQ | chr8: 98095364- | NM_016134/ | SEQ ID NO: 38 |
| 5′-CPQ(ex1-7 | 98095503/ | NM_004304 | |
| NM_016134)-ALK | chr2: 29447780- | | SEQ ID NO: 81 |
| (ex20-29 NM_004304). | 29448006 | | |
| Breakpoints in CPQ | CPQ ex1-7/ | | |
| intron 7 and ALK intron 19 | ALK ex20-29 | | |
| Lung non-small cell lung | | | |
| carcinoma (NOS) | | | |
| In frame fusion, includes | | | |
| ALK kinase domain. | | | |
| ALK-KIF5C | chr8: 149821504- | NM_016134/ | SEQ ID NO: 38 |
| 5′-CPQ(ex1-7 | 98095503/ | NM_004304 | |
| NM_016134)-ALK | chr2: 29447780- | | SEQ ID NO: 81 |
| (ex20-29 NM_004304). | 29448006 | | |
| Breakpoints in CPQ | CPQ ex1-7/ | | |
| intron 7 and ALK intron 19 | ALK ex20-29 | | |
| Lung non-small cell lung | | | |
| carcinoma (NOS) | | | |
| In frame fusion, includes | | | |
| ALK kinase domain. | | | |
| ALK-KIF5C | chr2: 149821504- | NM_004522/ | SEQ ID NO: 40 |
| 5′-KIF5C(ex1-11 | 149821810/ | NM_004304 | |
| NM_004522)-ALK | chr2: 29446775- | | SEQ ID NO: 83 |
| (ex20-29 NM_004304). | 29447077 | | |
| Breakpoints KIF5C | KIF5C ex1-11/ | | |
| intron 11, ALK intron 19 | ALK ex20-29 | | |
| Unknown primary | | | |
| carcinoma (NOS) | | | |
| In frame fusion, includes | | | |
| ALK kinase domain. | | | |
| ALK-MAGOHB | chr12: 10765965- | NM_018048/ | SEQ ID NO: 41 |
| 5′-MAGOHB(ex1-1 | 10765965/ | NM_004304 | |
| NM_018048)-ALK | chr2: 29446915- | | SEQ ID NO: 84 |
| (ex20-29 NM_004304). | 29446915 | | |
| Breakpoints MAGOHB | MAGOHB ex1-1/ | | |
| intron 1, ALK intron 19 | ALK ex20-29 | | |
| Anus squamous cell | | | |
| carcinoma | | | |
| In frame fusion, includes | | | |
| ALK kinase domain. | | | |
| ALK-COL3A1 | chr2: 189873873- | NM_000090/ | SEQ ID NO: 43 |
| 5′-COL3A1(ex1-48 | 189873913/ | NM_004304 | |
| NM_000090)-ALK | chr2: 29448334- | | SEQ ID NO: 86 |
| (ex19-29 NM_004304). | 29448374 | | |
| Breakpoints COL3A1 | COL3A1 ex1-48/ | | |
| intron 48, ALK intron 18. | ALK ex19-29 | | |
| Reciprocal: no | | | |
| Uterus leiolyosarcoma | | | |
| In frame fusion, includes | | | |
| ALK kinase domain. | | | |
| ALK-OPRM1 | chr6: 154466451- | NM_001008503/ | |
| 5′-OPRM1(ex1-3 | 154466754/ | NM_004304 | |
| NM_001008503)-ALK | chr2: 29446794- | | |
| (ex20-29 NM_004304). | 29447151 | | |
| Breakpoints OPRM1 | OPRM1 ex1-3/ | | |
| intron 3, ALK intron 19. | ALK ex20-29 | | |
| Lung adenocarcinoma | | | |
| Fusion includes ALK | | | |
| kinase domain. | | | |
| ALK-GPN1 | chr2: 27851952- | NM_007266/ | |
| 5′-GPN1(ex1-1 | 27852701/ | NM_004304 | |
| NM_007266)-ALK | chr2: 29451600- | | |
| (ex16-29 NM_004304). | 29452075 | | |
| Breakpoints GPN1 | GPN1 ex1-1/ | | |
| intron 1, ALK intron 15. | ALK ex16-29 | | |
| Reciprocal: yes | | | |
| Skin melanoma | | | |
| Fusion includes ALK | | | |
| kinase domain. | | | |
| ALK-SEC16B | chr1: 177916828- | NM_033127/ | |
| 5′-SEC16B(ex1-13 | 177917021/ | NM_004304 | |
| NM_033127)-ALK | chr2: 29456427- | | |
| (ex14-29 NM_004304). | 29456627 | | |
| Breakpoints SEC16B | SEC16B ex1-13/ | | |
| intron 13, ALK intron 13 | ALK ex14-29 | | |
| Esophagus adenocarcinoma | | | |
| Fusion includes ALK | | | |
| kinase domain. | | | |
| ALK-UBE2L3 | chr22: 21931222- | NM_00347/ | |
| 5′-UBE2L3(ex1-1 | 21931915/ | NM_004304 | |
| NM_00347)-ALK | chr2: 29450281- | | |
| (ex18-29 NM_004304). | 29450692 | | |
| Breakpoints ALK intron | UBE2L3 ex1-1/ | | |
| 17, UBE2L3 intron 1; | ALK ex18-29 | | |
| Reciprocal: Yes | | | |
| Skin melanoma | | | |
| Fusion includes ALK | | | |
| kinase domain. | | | |
| ALK-METTL25 | chr12: 82843057- | NM_032230/ | |
| 5′-METTL25(ex1-8 | 82843199/ | NM_004304 | |
| NM_032230 )-ALK | chr2: 29446633- | | |
| (ex20-29 NM_004304). | 29446761 | | |
| Breakpoints in ALK | METTL25 ex1-8/ | | |
| intron 19 and METTL25 | ALK ex20-29 | | |
| intron 8 | | | |
| Lung adenocarcinoma | | | |
| Fusion includes ALK | | | |
| kinase domain. | | | |
| ALK-CYS1 | chr2: 10214734- | NM_001037160/ | |
| 5′-CYS1(ex1-1 | 10215222/ | NM_004304 | |
| NM_001037160)-ALK | chr2: 29447165- | | |
| (NM_004304). | 29447594 | | |
| Breakpoints CYS1 | CYS1 ex1-1/ | | |
| intron 1, ALK intron 19 | ALK ex20-29 | | |
| Lung adenocarcinoma | | | |
| Fusion includes ALK | | | |
| kinase domain. | | | |
| ALK-ABCB11 | chr2: 169782189- | NM_003742/ | |
| 5′-ABCB11 (ex1-26 | 169782398/ | NM_004304 | |
| NM_003742)-ALK | chr2: 29447182- | | |
| (ex20-29 NM_004304). | 29447532 | | |
| Breakpoints in ABCB11 | ABCB11 ex1-26/ | | |
| intron 26 and ALK | ALK ex20-29 | | |
| intron 19 | | | |
| Lung non-small cell lung | | | |
| carcinoma (NOS) | | | |
| Fusion includes ALK | | | |
| kinase domain. | | | |
| ALK-INTS9 | chr8: 28655333- | NM_018250/ | |
| 5′-INTS9(ex1-8 | 28655587/ | NM_004304 | |
| NM_018250)-ALK | chr2: 29447949- | | |
| (ex20-29 NM_004304). | 29448294 | | |
| Breakpoints INTS9 | INTS ex1-8/ | | |
| intron 8 and ALK intron 19. | ALK ex20-29 | | |
| Reciprocal: No | | | |
| Lung adenocarcinoma | | | |
| Fusion includes ALK | | | |
| kinase domain. | | | |
| ALK-CIB4 | chr2: 26842893- | NM_001029881/ | |
| 5′-CIB4(ex1-3 | 26843172/ | NM_004304 | |
| NM_001029881)-ALK | chr2: 29448034- | | |
| (ex20-29 NM_004304). | 29448163 | | |
| Breakpoints CIB4 intron 3, | CIB ex1-3/ | | |
| ALK intron 19. | ALK ex20-29 | | |
| Lung adenocarcinoma | | | |
| Fusion includes ALK | | | |
| kinase domain. | | | |
| ALK-WDR92 | chr2: 68361884- | NM_138458/ | |
| 5′WDR92(ex1-7 | 68361924/ | NM_004304 | |
| NM_138458)-ALK | chr2: 29917846- | | |
| (ex2-29 NM_004304). | 29917886 | | |
| Breakpoints WDR92 | WDR92 ex1-7/ | | |
| intron 7, ALK intron 1. | ALK ex2-29 | | |
| Reciprocal: no | | | |
| Soft tissue leiomyosarcoma | | | |
| Fusion includes ALK | | | |
| kinase domain. | | | |
| ALK-OTX1 | chr2: 29446763- | NM_004304/ | |
| 5′-ALK(ex1-19 | 29447082/ | NM_014562 | |
| NM_004304)-OTX1 | chr2: 63282360- | | |
| (ex5-5 NM_014562). | 63282649 | | |
| Breakpoints ALK intron | ALK ex1-19/ | | |
| 19, OTX1 intron 4. | OTX1 ex5-5 | | |
| Lung adenocarcinoma | | | |
| ALK-PDCD10 | chr2: 29455118- | NM_004304/ | |
| 5′-ALK(ex1-15 | 29455261 | NM_007217 | |
| NM_004304)-PDCD10 | chr3: 167443055- | | |
| (ex3-9 NM_007217). | 167443292 | | |
| Breakpoints ALK intron 15, | ALK ex1-15/ | | |
| PDCD10 intron 2 | PDCD10 ex3-9 | | |
| Breast carcinoma (NOS) | | | |
| ALK-PTGER4 | chr2: 29446495- | NM_004304/ | |
| 5′-ALK(ex1-19 | 29446590/ | NM_000958 | |
| NM_004304)-PTGER | chr5: 40688492- | | |
| (ex3-3 NM_000958). | 40688617 | | |
| Breakpoints ALK intron 19, | ALK ex1-19/ | | |
| PTGER4 intron 2 | PTGER4 ex3-3 | | |
| Prostate acinar | | | |
| adenocarcinoma | | | |
| ALK-PTPRJ | chr2: 29447003- | NM_004304/ | |
| 5′-ALK(ex1-19 | 29447320/ | NM_002843 | |
| NM_004304)-PTPRJ | chr11: 48037100- | | |
| (ex2-25 NM_002843). | 48037371 | | |
| Breakpoints ALK intron | ALK ex1-19/ | | |
| 19, PTPRJ intron 1. | PTPRJ ex2-25 | | |
| Lung non-small cell lung | | | |
| carcinoma (NSCLC) (NOS) | | | |
| ALK-ZSWIM2 | chr2: 29447843- | NM_004304/ | |
| 5′-ALK(ex1-19 | 29448180/ | NM_182521 | |
| NM_182521). | chr2: 187699208- | | |
| Breakpoints ALK intron 19, | 187699458 | | |
| ZSWIM2 intron 5. | ALK ex1-19/ | | |
| Lung adenocarcinoma | ZSWIM2 ex6-9 | | |
| ALK-FHOD3 | chr2: 29449375- | NM_004304/ | |
| 5′-ALK(ex1-18 | 29449493/ | NM_025135 | |
| NM_004304)-FHOD3 | chr18: 34195667- | | |
| (ex10-25 NM_025135). | 34195872 | | |
| Breakpoints ALK intron 18, | ALK ex1-18/ | | |
| FHOD3 intron 9 | FHOD3 ex10-25 | | |
| Lung non-small cell lung | | | |
| carcinoma (NSCLC) (NOS) | | | |
| ALK-FILIP1L | chr2: 29449660- | NM_004304/ | |
| 5′-ALK(1-18 | 29449973/ | NM_182909 | |
| NM_004304)-FILP1L | chr3: 99688248- | | |
| (ex2-6 NM_182909). | 99688442 | | |
| Breakpoints ALK intron | ALK ex1-18/ | | |
| 18 and FILIP1L intron 1. | FILP1L ex2-6 | | |
| Reciprocal no | | | |
| Pancreas ductal | | | |
| adenocarcinoma | | | |
| ALK-ITGA6 | chr2: 29447349- | NM_004304/ | |
| 5′-ALK(ex1-19 | 29447349- | NM_000210 | |
| NM_004304)-ITGA6 | chr2: 173326199- | | |
| (ex2-26 NM_000210). | 173326199 | | |
| Breakpoints ALK intron | ALK ex1-19/ | | |
| 19, ITGA6 intron 1 | ITAG6 ex2-26 | | |
| Pancreas cancer (NOS) | | | |
| ALK-KCTD18 | chr2: 29447134- | NM_004304/ | |
| 5′-ALK(ex1-19 | 29447442/ | NM_152387 | |
| NM_004304)-KCTD18 | chr2: 201373509- | | |
| (ex2-7 NM_152387). | 201373886 | | |
| Breakpoints ALK intron 19, | ALK ex1-19/ | | |
| KCTD18 intron 1 | KCTD18 ex2-7 | | |
| Lung adenocarcinoma | | | |
| ALK-MAMDC4 | chr2: 29446201- | NM_004304/ | |
| 5′-ALK(ex1-20 | 29446434/ | NM_206920 | |
| NM_004304)-MAMDC | chr9: 139751298- | | |
| (ec16-27 NM_206920). | 139751629 | | |
| Breakpoints ALK intron | ALK ex1-20/ | | |
| 20, MAMDC4 intron 15. | MAMCD4 ex16-27 | | |
| Ovary clear cell carcinoma | | | |
| ALK-PELI1 | chr2: 64360629- | NM_020651/ | |
| 5′-PELI1(ex1 NM_020651)- | 64360629/ | NM_004304 | |
| ALK(ex20-29 NM_004304). | chr2: 29448116- | | |
| Breakpoints PELI1 intron 1, | 29448116 | | |
| ALK intron 19 | PELI1 ex1/ | | |
| Breast cancer (NOS) | ALK ex20-29 | | |
| Fusion includes ALK | | | |
| kinase domain. | | | |
| PELI exon 1 includes only | | | |
| part of 5′UTR, no coding | | | |
| sequence. | | | |
| ALK-LINC00535 | chr8: 94669651- | NR_033858/ | |
| 5′-LINC00535(ex1-5 | 94669972/ | NM_004304 | |
| NR_033858)-ALK | chr2: 29447755- | | |
| (ex20-29 NM_004304). | 29448172 | | |
| Breakpoints LINC00535 | LINC00535 ex1-5/ | | |
| intron 5, ALK intron 19 | ALK ex20-29 | | |
| Lung non-small cell lung | | | |
| carcinoma (NOS) | | | |
| Fusion includes ALK | | | |
| kinase domain. | | | |
| LINC00535 exons 1-5 | | | |
| include only UTR, no | | | |
| coding sequence. | | | |
| LINC00535 is a non-protein | | | |
| coding gene. | | | |
| ALK-CTBP1 | chr4: 1206164- | NM_001328/ | |
| 5′-CTBP1(ex1-9 | 1206291/ | NM_004304 | |
| NM_001328)-ALK | chr2: 29447285- | | |
| (ex20-29 NM_004304). | 29447572 | | |
| Breakpoints CTBP1 exon 9, | CTBP1 ex1-9/ | | |
| ALK intron 19 | ALK ex20-29 | | |
| Lung adenocarcinoma | | | |
| Fusion includes ALK | | | |
| kinase domain. | | | |
| ALK-CARMIL1 | chr6: 25550917- | NM_017640/ | |
| 5′-CARMIL1(ex1-27 | 25551280/ | NM_004304 | |
| NM_017640)-ALK | chr2: 29447579- | | |
| (ex20-29 NM_004304). | 29447824 | | |
| Breakpoints CARMIL1 | CARMIL1 ex1-27/ | | |
| exon 27, ALK intron 19 | ALK ex20-29 | | |
| Lung adenocarcinoma | | | |
| Fusion includes ALK | | | |
| kinase domain. | | | |
| ALK-ZNF513 | chr2: 27603440- | NM_144631/ | |
| 5′-ZNF513(ex1-1 | 27603620/ | NM_004304 | |
| NM_144631)-ALK | chr2: 30143106- | | |
| (ex1-29 NM_004304). | 30143448 | | |
| Breakpoints ZNF513 | ZNF513 ex1-1/ | | |
| exon 1, ALK exon 1 | ALK ex1-29 | | |
| Gallbladder adenocarcinoma | | | |
| Fusion includes ALK | | | |
| kinase domain. | | | |
| ALK-TMCO3 | chr13: 114163479- | NM_017905/ | |
| 5′-TMCO3(ex1-6 | 114163962/ | NM_004304 | |
| NM_017905)-ALK | chr2: 29497970- | | |
| (ex11-29 NM_004304). | 29498226 | | |
| Breakpoints ALK exon 11, | TMCO3 ex1-6/ | | |
| TMCO3 intron 6 | ALK ex11-29 | | |
| Unknown primary | | | |
| adenocarcinoma | | | |
| Fusion includes ALK | | | |
| kinase domain. | | | |
| ALK-SRSF7 | chr2: 38975362- | NM_001031684/ | |
| 5′-SRSF7(ex1-4 | 38975710 | NM_004304 | |
| NM_0010613684))-ALK | chr2: 29449531- | | |
| (ex18-29 NM_004304). | 29449920 | | |
| Breakpoints SRSF7 intron 4, | SRSF7 ex1-4/ | | |
| ALK exon 18 | ALK ex18-29 | | |
| Colon adenocarcinoma | | | |
| (CRC) | | | |
| Fusion includes ALK | | | |
| kinase domain. | | | |
| ALK-CASP8 | chr2: 202151038- | NM_001228/ | |
| 5′-CASP8(ex1-10 | 202151249/ | NM_004304 | |
| NM_001228)-ALK | chr2: 29969128- | | |
| (ex2-29 NM_004304). | 29969572 | | |
| Breakpoints CASP8 exon | CASP8 ex1-10/ | | |
| 10, ALK intron 1 | ALK ex2-29 | | |
| Vulva squamous cell | | | |
| carcinoma (SCC) | | | |
| Fusion includes ALK | | | |
| kinase domain. | | | |
| ALK-CYP51A1 | chr7: 91745465- | NM_000786/ | |
| 5′-CYP51A1(ex1-9 | 91745693/ | NM_004304 | |
| NM_000786)-ALK | chr2: 29917599- | | |
| (ex3-29 NM_004304). | 29917771 | | |
| Breakpoints CYP51A1 | CYP51A1 ex1-9/ | | |
| intron 9, ALK exon 3 | ALK ex3-29 | | |
| Ovary high grade serous | | | |
| carcinoma | | | |
| Fusion includes ALK | | | |
| kinase domain. | | | |
| ALK-GPR113 | chr2: 26546664- | NM_153835/ | |
| 5′-GPR113(ex1-1 | 26546664/ | NM_004304 | |
| NM_153835)-ALK | chr2: 29448344- | | |
| (ex19-29 NM_004304). | 29448344 | | |
| Breakpoints GPR113 | GPR113 ex1-1/ | | |
| intron 1, ALK exon 19 | ALK ex19-29 | | |
| Prostate acinar | | | |
| adenocarcinoma | | | |
| Fusion includes ALK | | | |
| kinase domain. | | | |
| ALK-HADHA | chr2: 26456000- | NM_000182/ | |
| 5′-HADHA(ex1-5 | 26456242/ | NM_004304 | |
| NM_000182)-ALK | chr2: 29606503- | | |
| (ex5-29 NM_004304). | 29606657 | | |
| Breakpoints HADHA | HADHA ex1-5/ | | |
| intron 5, ALK exon 5 | ALK ex5-29 | | |
| Fallopian tube serous | | | |
| carcinoma | | | |
| Fusion includes ALK | | | |
| kinase domain. | | | |
| ALK-LRRFIP2 | chr3: 37111067- | NM_006309/ | |
| 5′-LRRFIP2(ex1-22 | 37111382/ | NM_004304 | |
| NM_006309)-ALK | chr2: 29446062- | | |
| (ex20-29 NM_004304). | 29446344 | | |
| Breakpoints LRRFIP2 | LRRFIP2 ex1-22/ | | |
| intron 22, ALK exon 20. | ALK ex20-29 | | |
| Lung adenocarcinoma | | | |
| Fusion includes ALK | | | |
| kinase domain. | | | |
| ALK-MYH10 | chr17: 8383515- | NM_005964/ | |
| 5′-MYH10(ex1-38 | 8383800/ | NM_004304 | |
| NM_005964)-ALK | chr2: 29446135- | | |
| (ex20-29 NM_004304). | 29446423 | | |
| Breakpoints MYH10 | MYH10 ex1-38/ | | |
| exon 38, ALK intron 19 | ALK ex20-29 | | |
| Pediactric Soft tissue | | | |
| sarcoma (NOS) | | | |
| Fusion includes ALK | | | |
| kinase domain. | | | |
| ALK-PDE3A | chr12: 20796733- | NM_000921/ | |
| 5′-PDE3A(ex1-10 | 20796837/ | NM_004304 | |
| NM_000921)-ALK | chr2: 29541064- | | |
| (ex8-29 NM_004304). | 29541218 | | |
| Breakpoints PDE3A | PDE3A ex1-10/ | | |
| introno 10, ALK exon 8 | ALK ex8-29 | | |
| Pediatric Bone | | | |
| osteosarcoma | | | |
| Fusion includes ALK | | | |
| kinase domain. | | | |
| ALK-PLEC | chr8: 145009233- | NM_000445/ | |
| 5′-PLEC(ex1-9 | 145009424/ | NM_004304 | |
| NM_000445)-ALK | chr2: 29447974- | | |
| (ex20-29 NM_004304). | 29448217 | | |
| Breakpoints PLEC exon 9, | PLEC ex1-9/ | | |
| ALK intron 19 | ALK ex20-29 | | |
| Uterus endometrial | | | |
| adenocarcinoma | | | |
| endometrioid | | | |
| Fusion includes ALK | | | |
| kinase domain. | | | |
| ALK-QKI | chr6: 163890860- | NM_006775/ | |
| 5′-QKI(ex1-2 | 163891168/ | NM_004304 | |
| NM_006775)-ALK | chr2: 29446065- | | |
| (ex20-29 NM_004304). | 29446378 | | |
| Breakpoints QKI intron 2, | QKI ex1-2/ | | |
| ALK exon 20 | ALK ex20-29 | | |
| Brain glioblastoma (GBM) | | | |
| Fusion includes ALK | | | |
| kinase domain. | | | |
| ALK-SASH1 | chr6: 148853694- | NM_015278/ | |
| 5′-SASH1(ex1-14 | 148853955/ | NM_004304 | |
| NM_015278)-ALK | chr2: 29449754- | | |
| (ex18-29 NM_004304). | 29449930 | | |
| Breakpoint SASH1 exon 14, | SASH1 ex1-14/ | | |
| ALK intron 17 | ALK ex18-29 | | |
| Brain glioblastoma (GBM) | | | |
| Fusion includes ALK | | | |
| kinase domain. | | | |
| ALK-SRSF7 | chr2: 38974723- | NM_001031684/ | |
| 5′-SRSF7(ex1-5 | 38975203/ | NM_004304 | |
| NM_001031684)-ALK | chr2: 29449640- | | |
| (ex18-29 NM_004304). | 29449923 | | |
| Breakpoints SRSF7 intron 5, | SRSF7 ex1-5/ | | |
| ALK exon 18. | ALK ex18-29 | | |
| Pancreas ductal | | | |
| adenocarcinoma | | | |
| Fusion includes ALK | | | |
| kinase domain. | | | |
| ALK-VASP | chr19: 46024804- | NM_003370/ | |
| 5′-VASP(ex1-4 | 46025190/ | NM_004304 | |
| NM_003370)-ALK | chr2: 29543503- | | |
| (ex7-29 NM_004304). | 29543740 | | |
| Breakpoints VASP intron 4, | VASP ex1-4/ | | |
| ALK exon 7 | ALK ex7-29 | | |
| Ovary clear cell carcinoma | | | |
| Fusion includes ALK | | | |
| kinase domain. | | | |
| ALK-ZNF446 | chr19: 58991381- | NM_017908/ | |
| 5′-ZNF446(ex1-7 | 58991664/ | NM_004304 | |
| NM_017908)-ALK | chr2: 29446677- | | |
| (ex20-29 NM_004304). | 29446960 | | |
| Breakpoints ZNF446 | ZNF446 ex1-7/ | | |
| exon 7, ALK intron 19 | ALK ex20-29 | | |
| Ovary serous carcinoma | | | |
| Fusion includes ALK | | | |
| kinase domain. | | | |
| ALK-SOX13 | chr1: 204042405- | NM_005686/ | |
| 5′-SOX13(ex 1 | 204042653/ | NM_004304 | |
| NM_005686)-ALK | chr2: 29449452- | | |
| (ex18-29 NM_004304). | 29449864 | | |
| Breakpoints SOX13 | SOX13 ex1/ | | |
| exon 1, ALK exon 18 | ALK ex18-29 | | |
| Pediatric Skin melanoma | | | |
| Fusion includes ALK | | | |
| kinase domain. | | | |
| SOX13 exon 1 includes | | | |
| only part of 5′UTR, | | | |
| no coding sequence. | | | |
| ALK-YPEL5 | chr2: 20378123- | NM_016061/ | |
| 5′ (YPEL5 ex 1 | 30378424 | NM_004304 | |
| NM_016061)-ALK | chr2: 29449645- | | |
| (ex18-29 NM_004304). | 29449918 | | |
| Breakpoints YPEL5 | YPEL5 ex1/ | | |
| intron 1 and ALK exon 18. | ALKex18-29 | | |
| Reciprocal: no. | | | |
| Fusion includes ALK | | | |
| kinase domain. | | | |
| YPEL5 exon 1 includes | | | |
| only part of 5′UTR, no | | | |
| coding sequence. | | | |
| ALK-CAPN14 | chr2: 29456468- | NM_004304/ | |
| 5′-ALK(ex1-14 | 29456549/ | NM_001145122 | |
| NM_004304)-CAPN14 | chr2: 31426279- | | |
| (ex3-22 NM_001145122). | 31426378 | | |
| Breakpoints ALK exon 14, | ALK ex1-14/ | | |
| CAPN14 intron 2 | CAPN14 ex3-22 | | |
| Small intestine | | | |
| adenocarcinoma | | | |
| ALK-MAP3J9 | chr2: 30142828- | NM_004304/ | |
| 5′-ALK(ex1-1 | 30143036/ | NM_033141 | |
| NM_004304)-MAP3K9 | chr14: 71216554- | | |
| (ex4-13 NM_033141). | 71216698 | | |
| Breakpoints ALK intron 1, | ALK ex1-1/ | | |
| MAP3K9 exon 4 | MAP3K9 ex4-13 | | |
| Breast carcinoma (NOS) | | | |
| ALK-SNX17 | chr2: 29462409- | NM_004304/ | |
| 5′-ALK(ex1-13 | 29462706/ | NM_014748 | |
| NM_004304)-SNX17 | chr2: 27595576- | | |
| (ex3-15 NM_014748). | 27595761 | | |
| Breakpoints ALK intron 13, | ALK ex1-13/ | | |
| SNX17 exon 3 | SNX17 ex3-15 | | |
| Prostate acinar | | | |
| adenocarcinoma | | | |
| ALK-HS1BP3 | chr2: 29446985- | NM_004304/ | |
| 5′-ALK(ex1-19 | 29447221/ | NM_022460 | |
| NM_004304)-HS1BP3 | chr2: 20838147- | | |
| (ex4-7 NM_022460). | 20838335 | | |
| Breakpoints in ALK | ALK ex1-19/ | | |
| intron 19 and HS1BP3 | HS1BP3 ex4-7 | | |
| exon 4. | | | |
| Lung adenocarcinoma | | | |
| ALK-CREBBP | chr2: 29797462- | NM_004304/ | |
| 5′-ALK(ex1-3 | 29797842/ | NM_004380 | |
| NM_004304)-CREBBP | chr16: 3900331- | | |
| (ex2-31 NM_004380). | 3900680 | | |
| Breakpoints ALK intron 3, | ALK ex1-3/ | | |
| CREBBP exon 2 | BREBBP ex2-31 | | |
| Ovary serous carcinoma | | | |
| ALK-PAQR4 | chr2: 29917567- | NM_004304/ | |
| 5′-ALK(ex1-3 | 299178551/ | NM_152341 | |
| NM_004304)-PAQR | chr16: 3019620- | | |
| (ex1-13 NM_152341). | 3019700 | | |
| Breakpoints ALK intron 3, | ALK ex1-3/ | | |
| PAQR4 exon 1 | PAQR4 ex1-3 | | |
| Breast carcinoma (NOS) | | | |
| ALK-APH1A | chr2: 29669577- | NM_004304/ | |
| 5′-ALK(ex1-4 | 29669873/ | NM_016022 | |
| NM_004304)-APH1A | chr1: 150239704- | | |
| (ex4-6 NM_016022). | 150239811 | | |
| Breakpoints ALK intron 4, | ALK ex1-4/ | | |
| APH1A exon 4 | APH1A ex4-6 | | |
| Uterus leiomyosarcoma | | | |

[0817] ALK rearrangements, such as the ALK gene fusions identified in this Example, may confer sensitivity of cancers to treatments, such as ALK-targeted therapies. Such ALK-targeted therapies include ALK inhibitors, such as alectinib, brigatinib, ceritinib, crizotinib, entrectinib, and lorlatinib (see, e.g., Peters et al., The New England journal of medicine vol. 377, 9 (2017): 829-838; Gettinger et al., The Lancet. Oncology vol. 17, 12 (2016): 1683-1696; Camidge et al., Journal of clinical oncology, vol. 36, 26 (2018): 2693-2701; Kim et al., The Lancet. Oncology vol. 17, 4 (2016): 452-463; Solomon et al., Journal of clinical oncology, vol. 36, 22 (2018): 2251-2258; Solomon et al., The New England journal of medicine, vol. 371, 23 (2014): 2167-77; Drilon et al., Cancer discovery vol. 7, 4 (2017): 400-409; Shaw et al., The Lancet. Oncology vol. 18, 12 (2017): 1590-1599; Shaw et al., Journal of Clinical Oncology 2018 36:15_suppl, 9008-9008; Besse et al., Journal of Clinical Oncology 2018 36:15_suppl, 9032-9032; and Shaw et al., Cancer Res Jul. 1 2018 (78) (13 Supplement) CT044).

1. A method of identifying an individual having a cancer who may benefit from a treatment comprising an anaplastic lymphoma kinase (ALK)-targeted therapy, the method comprising detecting in a sample from the individual:
(a) an ALK fusion nucleic acid molecule comprising a fusion between an ALK gene, or a portion thereof, and a gene listed in Table 1, or a portion thereof, or
(b) an ALK fusion polypeptide encoded by the ALK fusion nucleic acid molecule,
wherein detection of the ALK fusion nucleic acid molecule or polypeptide in the sample identifies the individual as one who may benefit from the treatment comprising the ALK-targeted therapy.

2. A method of identifying one or more treatment options for an individual having a cancer, the method comprising:
(a) detecting in a sample from the individual:
(i) an ALK fusion nucleic acid molecule comprising a fusion between an ALK gene, or a portion thereof, and a gene listed in Table 1, or a portion thereof, or
(ii) an ALK fusion polypeptide encoded by the ALK fusion nucleic acid molecule; and
(b) generating a report comprising one or more treatment options identified for the individual based at least in part on detection of the ALK fusion nucleic acid molecule or polypeptide in the sample, wherein the one or more treatment options comprise an ALK-targeted therapy.

3. A method of treating or delaying progression of cancer in an individual in need thereof, comprising:
(a) acquiring knowledge of:
(i) an ALK fusion nucleic acid molecule comprising a fusion between an ALK gene, or a portion thereof, and a gene listed in Table 1, or a portion thereof, or
(ii) an ALK fusion polypeptide encoded by the ALK fusion nucleic acid molecule,
in a sample from an individual having a cancer; and
(b) responsive to said knowledge, administering to the individual an effective amount of a treatment that comprises an ALK-targeted therapy.

4. The method of claim 1, wherein:
(a) the ALK fusion nucleic acid molecule is an ALK fusion nucleic acid molecule listed in Table 2, and wherein the order of the genes in the fusion in the 5′ to 3′ direction is as listed in Table 2;
(b) the ALK fusion nucleic acid molecule is an ALK fusion nucleic acid molecule listed in Table 3, and wherein the ALK fusion nucleic acid molecule comprises or results from a corresponding 5′ breakpoint and/or 3′ breakpoint within the exons or introns as listed in Table 3;
(c) the ALK fusion nucleic acid molecule is an ALK fusion nucleic acid molecule listed in Table 4, and wherein the ALK fusion nucleic acid molecule comprises or results from a corresponding 5′ breakpoint within the chromosomal coordinates as listed in Table 4, and/or a corresponding 3′ breakpoint within the chromosomal coordinates as listed in Table 4;
(d) the ALK fusion nucleic acid molecule is an ALK fusion nucleic acid molecule listed in Table 5, and wherein the ALK fusion nucleic acid molecule comprises or results from a fusion of a corresponding 5′ exon as listed in Table 5, or a portion thereof, fused to a corresponding 3′ exon as listed in Table 5, or a portion thereof;
(e) the ALK fusion nucleic acid molecule is an ALK fusion nucleic acid molecule listed in Table 6, and wherein the ALK fusion nucleic acid molecule comprises, in the 5′ to 3′ direction, the corresponding exons or portions thereof as listed in Table 6;
(f) the ALK fusion nucleic acid molecule is an ALK fusion nucleic acid molecule listed in Table 7, and wherein the ALK fusion nucleic acid molecule comprises a corresponding nucleotide sequence as listed in Table 7, or a nucleotide sequence with at least about 70% homology thereto; and/or
(g) the ALK fusion nucleic acid molecule comprises a nucleotide sequence encoding an ALK fusion polypeptide that comprises an amino acid sequence as listed in Table 8, or an amino acid sequence with at least about 70% homology thereto.

5. The method of claim 1, wherein the ALK fusion polypeptide encoded by the ALK fusion nucleic acid molecule:
(a) comprises an ALK kinase domain, or a fragment of an ALK kinase domain having ALK kinase activity;
(b) has ALK kinase activity;
(c) has constitutive ALK kinase activity;
(d) is oncogenic;
(e) promotes cancer cell survival, angiogenesis, cancer cell proliferation, and any combination thereof;
(f) is capable of dimerizing with an ALK polypeptide or with another ALK fusion polypeptide in a cancer cell; and/or
(g) is an ALK fusion polypeptide listed in Table 8, and wherein the ALK fusion polypeptide comprises a corresponding amino acid sequence as listed in Table 8, or an amino acid sequence with at least about 70% homology thereto.

6. The method of claim 1, wherein the cancer is:
(a) a carcinoma, a sarcoma, a lymphoma, a leukemia, a myeloma, a germ cell cancer, or a blastoma;
(b) a solid tumor;
(c) a hematologic malignancy;
(d) a lymphoma;
(e) a non-small cell lung carcinoma, a leiomyosarcoma, a thyroid carcinoma, a colorectal cancer, a pancreatic cancer, or a malignant peritoneal mesothelioma;
(f) a B cell cancer, multiple myeloma, a melanoma, breast cancer, lung cancer, bronchus cancer, colorectal cancer, prostate cancer, pancreatic cancer, stomach cancer, ovarian cancer, urinary bladder cancer, brain cancer, central nervous system cancer, peripheral nervous system cancer, esophageal cancer, cervical cancer, uterine cancer, endometrial cancer, cancer of an oral cavity, cancer of a pharynx, liver cancer, kidney cancer, testicular cancer, biliary tract cancer, small bowel cancer, appendix cancer, salivary gland cancer, thyroid gland cancer, adrenal gland cancer, osteosarcoma, chondrosarcoma, a cancer of hematological tissue, an adenocarcinoma, an inflammatory myofibroblastic tumor, a gastrointestinal stromal tumor (GIST), colon cancer, myelodysplastic syndrome (MDS), myeloproliferative disorder (MPD), acute lymphocytic leukemia (ALL), acute myelocytic leukemia (AML), chronic myelocytic leukemia (CML), chronic lymphocytic leukemia (CLL), polycythemia Vera, Hodgkin lymphoma, non-Hodgkin lymphoma (NHL), soft-tissue sarcoma, fibrosarcoma, myxosarcoma, liposarcoma, osteogenic sarcoma, chordoma, angiosarcoma, endotheliosarcoma, lymphangiosarcoma, lymphangioendotheliosarcoma, synovioma, mesothelioma, Ewing's tumor, leiomyosarcoma, rhabdomyosarcoma, squamous cell carcinoma, basal cell carcinoma, adenocarcinoma, sweat gland carcinoma, sebaceous gland carcinoma, papillary carcinoma, papillary adenocarcinomas, medullary carcinoma, bronchogenic carcinoma, renal cell carcinoma, hepatoma, bile duct carcinoma, choriocarcinoma, seminoma, embryonal carcinoma, Wilms' tumor, bladder carcinoma, epithelial carcinoma, glioma, astrocytoma, medulloblastoma, craniopharyngioma, ependymoma, pinealoma, hemangioblastoma, acoustic neuroma, oligodendroglioma, meningioma, neuroblastoma, retinoblastoma, follicular lymphoma, diffuse large B-cell lymphoma, mantle cell lymphoma, hepatocellular carcinoma, thyroid cancer, gastric cancer, head and neck cancer, small cell cancer, essential thrombocythemia, agnogenic myeloid metaplasia, hypereosinophilic syndrome, systemic mastocytosis, familiar hypereosinophilia, chronic eosinophilic leukemia, neuroendocrine cancers, or a carcinoid tumor; or
(g) an anus squamous cell carcinoma, brain glioblastoma (GBM), breast cancer, breast carcinoma, breast invasive ductal carcinoma (IDC), colon adenocarcinoma (CRC), esophagus adenocarcinoma, fallopian tube serous carcinoma, gallbladder adenocarcinoma, gallbladder carcinoma, gastroesophageal junction adenocarcinoma, lung adenocarcinoma, lung non-small cell lung carcinoma, lung non-small cell lung carcinoma, lymph node Castleman's disease, lymph node lymphoma T-cell, ovary clear cell carcinoma, ovary endometrioid adenocarcinoma, ovary epithelial carcinoma, ovary high grade serous carcinoma, ovary serous carcinoma, pancreas cancer, pancreas ductal adenocarcinoma, pediatric bone osteosarcoma, bone osteosarcoma, pediatric skin melanoma, skin melanoma, pediatric soft tissue sarcoma, soft tissue sarcoma, pediatric soft tissue sarcoma undifferentiated, soft tissue sarcoma undifferentiated, peritoneum serous carcinoma, prostate acinar adenocarcinoma, small intestine adenocarcinoma, soft tissue leiomyosarcoma, soft tissue liposarcoma, thyroid papillary carcinoma, unknown primary adenocarcinoma, unknown primary carcinoma, unknown primary malignant neoplasm, unknown primary myoepithelial carcinoma, uterus carcinosarcoma, uterus endometrial adenocarcinoma endometrioid, uterus leiomyosarcoma, or vulva squamous cell carcinoma (SCC).

7. The method of claim 1, wherein the ALK fusion nucleic acid molecule is an ALK fusion nucleic acid molecule listed in Table 9 or the ALK fusion polypeptide is an ALK fusion polypeptide listed in Table 9, and wherein the cancer is the corresponding cancer as listed in Table 9.

8. The method of claim 1, wherein:
(a) the cancer is metastatic;
(b) the cancer has metastasized to the brain of the individual;
(c) the individual has an intracranial metastasis of the cancer or an extracranial metastasis of the cancer;
(d) the cancer has not metastasized to the brain of the individual;
(e) the individual does not have an intracranial metastasis of the cancer; or
(f) the individual does not have an extracranial metastasis of the cancer.

9. The method of claim 1, wherein the ALK-targeted therapy:
(a) comprises one or more of a small molecule inhibitor, an antibody, a cellular therapy, a nucleic acid, a virus-based therapy, an antibody-drug conjugate, a recombinant protein, a fusion protein, a natural compound, a peptide, a PROteolysis-TArgeting Chimera (PROTAC), a treatment for ALK-positive or ALK-rearranged cancer, an ALK-targeted therapy being tested in a clinical trial, a treatment for ALK-positive or ALK-rearranged cancer being tested in a clinical trial, or any combination thereof;
(b) is a kinase inhibitor;
(c) is a tyrosine kinase inhibitor, a kinase inhibitor that inhibits the kinase activity of an ALK polypeptide, a multi-kinase inhibitor, or an ALK-specific inhibitor; or
(d) comprises one or more of crizotinib, alectinib, ceritinib, lorlatinib, brigatinib, ensartinib (X-396), repotrectinib (TPX-005), entrectinib (RXDX-101), AZD3463, CEP-37440, belizatinib (TSR-011), ASP3026, KRCA-0008, TQ-B3139, TPX-0131, TAE684 (NVP-TAE684), CT-707, WX-0593, alkotinib, SIM1803-1A, PLB1003, SAF-189s, PF03446962, TQ-B3101, APG-2449, X-376, CEP-28122, and GSK1838705A.

10. The method of claim 1, wherein:
(a) the individual has received a prior anti-cancer treatment, or is being treated with an anti-cancer treatment;
(b) the cancer has not been previously treated;
(c) the cancer has not been previously treated with crizotinib;
(d) the cancer has not been previously treated with a kinase inhibitor;
(e) the cancer has been previously treated with a kinase inhibitor; or
(f) the cancer progressed on a prior treatment with a kinase inhibitor or is refractory to a prior kinase inhibitor treatment.

11. The method of claim 10, wherein the ALK fusion nucleic acid molecule and/or the ALK fusion polypeptide encoded by the ALK fusion nucleic acid molecule confer resistance of the cancer to the prior anti-cancer treatment.

12. The method of claim 1, wherein the cancer further comprises one or more mutations or rearrangements in an ALK kinase domain encoded by an ALK gene, and/or the ALK fusion nucleic acid molecule encodes an ALK fusion polypeptide comprising an ALK kinase domain, or a portion thereof, comprising one or more mutations in the ALK kinase domain.

13. The method of claim 1, wherein the treatment further comprises an additional anti-cancer therapy.

14. The method of claim 13, wherein the additional anti-cancer therapy comprises: (a) one or more of a small molecule inhibitor, a chemotherapeutic agent, a cancer immunotherapy, an antibody, a cellular therapy, a nucleic acid, a surgery, a radiotherapy, an anti-angiogenic therapy, an anti-DNA repair therapy, an anti-inflammatory therapy, an anti-neoplastic agent, a growth inhibitory agent, a cytotoxic agent, a vaccine, a small molecule agonist, a virus-based therapy, an antibody-drug conjugate, a recombinant protein, a fusion protein, a natural compound, a peptide, a PROteolysis-TArgeting Chimera (PROTAC), or any combination thereof; or (b) one or more of a heat shock protein 90 inhibitor, an EGFR inhibitor, a SHP2 inhibitor, a MEK inhibitor, an IGF-1R inhibitor, a vascular endothelial growth factor (VEGF)-targeted therapy, or an mTOR inhibitor.

15. The method of claim 1, wherein:
(a) the method further comprises obtaining the sample from the individual;
(b) the sample is obtained from the cancer;
(c) the sample comprises a tissue biopsy sample, a tumor biopsy sample, a tumor specimen, a liquid biopsy sample, a normal control, circulating tumor cells, circulating tumor DNA (ctDNA), cell-free DNA, or cell-free RNA; and/or
(d) the sample comprises cells and/or nucleic acids from the cancer.

16. The method of claim 3, wherein the acquiring knowledge of the ALK fusion nucleic acid molecule or the ALK fusion polypeptide encoded by the ALK fusion nucleic acid molecule comprises detecting the ALK fusion nucleic acid molecule or polypeptide in the sample.

17. The method of claim 1, wherein: (a) detecting the ALK fusion nucleic acid molecule in the sample comprises detecting a fragment of the ALK fusion nucleic acid molecule comprising a breakpoint or fusion junction between the ALK gene, or the portion thereof, and the gene listed in Table 1, or the portion thereof; and/or (b) detecting the ALK fusion polypeptide comprises detecting a portion of the ALK fusion polypeptide that is encoded by a fragment of the ALK fusion nucleic acid molecule that comprises a breakpoint or fusion junction between the ALK gene, or the portion thereof, and the gene listed in Table 1, or the portion thereof.

18. The method of claim 1, wherein:
(a) the ALK fusion nucleic acid molecule is detected in the sample by one or more of: a nucleic acid hybridization assay, an amplification-based assay, a polymerase chain reaction-restriction fragment length polymorphism (PCR-RFLP) assay, real-time PCR, a screening analysis, fluorescence in situ hybridization (FISH), spectral karyotyping, multicolor FISH (mFISH), comparative genomic hybridization, in situ hybridization, sequence-specific priming (SSP) PCR, high-performance liquid chromatography (HPLC), mass-spectrometric genotyping, or sequencing; and/or
(b) the ALK fusion polypeptide is detected in the sample by one or more of:
immunoblotting, enzyme linked immunosorbent assay (ELISA), immunohistochemistry, or mass spectrometry.

19. The method of claim 1, further comprising acquiring knowledge of or detecting in a sample from the individual a base substitution, a short insertion/deletion (indel), a copy number alteration, or a genomic rearrangement in one or more genes.

20. The method of claim 1, wherein the individual is a human.

The application's sequence listing, which the Patent Office published only in electronic form, follows.

SEQUENCE LISTING (274 sequences)

SEQ ID NO: 1 - DNA, 5619 bp, Homo sapiens
  source 1..5619: mol_type = unassigned DNA
atgatgagctttgtgcaaaaggggagctggctacttctcgctctgcttcatcccactattattttggcacaacaggaagctgttgaaggaggatgttcccatcttggtcagtcctatgcggatagagatgtctggaagccagaaccatgccaaatatgtgtctgtgactcaggatccgttctctgcgatgacataatatgtgacgatcaagaattagactgccccaacccagaaattccatttggagaatgttgtgcagtttgcccacagcctccaactgctcctactcgccctcctaatggtcaaggacctcaaggccccaagggagatccaggccctcctggtattcctgggagaaatggtgaccctggtattccaggacaaccagggtcccctggttctcctggcccccctggaatctgtgaatcatgccctactggtcctcagaactattctccccagtatgattcatatgatgtcaagtctggagtagcagtaggaggactcgcaggctatcctggaccagctggccccccaggccctcccggtccccctggtacatctggtcatcctggttcccctggatctccaggataccaaggaccccctggtgaacctgggcaagctggtccttcaggccctccaggacctcctggtgctataggtccatctggtcctgctggaaaagatggagaatcaggtagacccggacgacctggagagcgaggattgcctggacctccaggtatcaaaggtccagctgggatacctggattccctggtatgaaaggacacagaggcttcgatggacgaaatggagaaaagggtgaaacaggtgctcctggattaaagggtgaaaatggtcttccaggcgaaaatggagctcctggacccatgggtccaagaggggctcctggtgagcgaggacggccaggacttcctggggctgcaggtgctcggggtaatgacggtgctcgaggcagtgatggtcaaccaggccctcctggtcctcctggaactgccggattccctggatcccctggtgctaagggtgaagttggacctgcagggtctcctggttcaaatggtgcccctggacaaagaggagaacctggacctcagggacacgctggtgctcaaggtcctcctggccctcctgggattaatggtagtcctggtggtaaaggcgaaatgggtcccgctggcattcctggagctcctggactgatgggagcccggggtcctccaggaccagccggtgctaatggtgctcctggactgcgaggtggtgcaggtgagcctggtaagaatggtgccaaaggagagcccggaccacgtggtgaacgcggtgaggctggtattccaggtgttccaggagctaaaggcgaagatggcaaggatggatcacctggagaacctggtgcaaatgggcttccaggagctgcaggagaaaggggtgcccctgggttccgaggacctgctggaccaaatggcatcccaggagaaaagggtcctgctggagagcgtggtgctccaggccctgcagggcccagaggagctgctggagaacctggcagagatggcgtccctggaggtccaggaatgaggggcatgcccggaagtccaggaggaccaggaagtgatgggaaaccagggcctcccggaagtcaaggagaaagtggtcgaccaggtcctcctgggccatctggtccccgaggtcagcctggtgtcatgggcttccccggtcctaaaggaaatgatggtgctcctggtaagaatggagaacgaggtggccctggaggacctggccctcagggtcctcctggaaagaatggtgaaactggacctcagggacccccagggcctactgggcctggtggtgacaaaggagacacaggaccccctggtccacaaggattacaaggcttgcctggtacaggtggtcctccaggagaaaatggaaaacctggggaaccaggtccaaagggtgatgccggtgcacctggagctccaggaggcaagggtgatgctggtgcccctggtgaacgtggacctcctggattggcaggggccccaggacttagaggtggagctggtccccctggtcccgaaggaggaaagggtgctgctggtcctcctgggccacctggtgctgctggtactcctggtctgcaaggaatgcctggagaaagaggaggtcttggaagtcctggtccaaagggtgacaagggtgaaccaggcggtccaggtgctgatggtgtcccagggaaagatggcccaaggggtcctactggtcctattggtcctcctggcccagctggccagcctggagataagggtgaaggtggtgcccccggacttccaggtatagctggacctcgtggtagccctggtgagagaggtgaaactggccctccaggacctgctggtttccctggtgctcctggacagaatggtgaacctggtggtaaaggagaaagaggggctccgggtgagaaaggtgaaggaggccctcctggagttgcaggaccccctggaggttctggacctgctggtcctcctggtccccaaggtgtcaaaggtgaacgtggcagtcctggtggacctggtgctgctggcttccctggtgctcgtggtcttcctggtcctcctggtagtaatggtaacccaggacccccaggtcccagcggttctccaggcaaggatgggcccccaggtcctgcgggtaacactggtgctcctggcagccctggagtgtctggaccaaaaggtgatgctggccaaccaggagagaagggatcgcctggtgcccagggcccaccaggagctccaggcccacttgggattgctgggatcactggagcacggggtcttgcaggaccaccaggcatgccaggtcctaggggaagccctggccctcagggtgtcaagggtgaaagtgggaaaccaggagctaacggtctcagtggagaacgtggtccccctggaccccagggtcttcctggtctggctggtacagctggtgaacctggaagagatggaaaccctggatcagatggtcttccaggccgagatggatctcctggtggcaagggtgatcgtggtgaaaatggctctcctggtgcccctggcgctcctggtcatccaggcccacctggtcctgtcggtccagctggaaagagtggtgacagaggagaaagtggccctgctggccctgctggtgctcccggtcctgctggttcccgaggtgctcctggtcctcaaggcccacgtggtgacaaaggtgaaacaggtgaacgtggagctgctggcatcaaaggacatcgaggattccctggtaatccaggtgccccaggttctccaggccctgctggtcagcagggtgcaatcggcagtccaggacctgcaggccccagaggacctgttggacccagtggacctcctggcaaagatggaaccagtggacatccaggtcccattggaccaccagggcctcgaggtaacagaggtgaaagaggatctgagggctccccaggccacccagggcaaccaggccctcctggacctcctggtgcccctggtccttgctgtggtggtgttggagccgctgccattgctgggattggaggtgaaaaagctggcggttttgccccgtattatggagatgaaccaatggatttcaaaatcaacaccgatgagattatgacttcactcaagtctgttaatggacaaatagaaagcctcattagtcctgatggttctcgtaaaaaccccgctagaaactgcagagacctgaaattctgccatcctgaactcaagagtgtgtcacccaccccggagccacacctgccactctcgctgatcctctctgtggtgacctctgccctcgtggccgccctggtcctggctttctccggcatcatgattgtgtaccgccggaagcaccaggagctgcaagccatgcagatggagctgcagagccctgagtacaagctgagcaagctccgcacctcgaccatcatgaccgactacaaccccaactactgctttgctggcaagacctcctccatcagtgacctgaaggaggtgccgcggaaaaacatcaccctcattcggggtctgggccatggcgcctttggggaggtgtatgaaggccaggtgtccggaatgcccaacgacccaagccccctgcaagtggctgtgaagacgctgcctgaagtgtgctctgaacaggacgaactggatttcctcatggaagccctgatcatcagcaaattcaaccaccagaacattgttcgctgcattggggtgagcctgcaatccctgccccggttcatcctgctggagctcatggcggggggagacctcaagtccttcctccgagagacccgccctcgcccgagccagccctcctccctggccatgctggaccttctgcacgtggctcgggacattgcctgtggctgtcagtatttggaggaaaaccacttcatccaccgagacattgctgccagaaactgcctcttgacctgtccaggccctggaagagtggccaagattggagacttcgggatggcccgagacatctacagggcgagctactatagaaagggaggctgtgccatgctgccagttaagtggatgcccccagaggccttcatggaaggaatattcacttctaaaacagacacatggtcctttggagtgctgctatgggaaatcttttctcttggatatatgccataccccagcaaaagcaaccaggaagttctggagtttgtcaccagtggaggccggatggacccacccaagaactgccctgggcctgtataccggataatgactcagtgctggcaacatcagcctgaagacaggcccaactttgccatcattttggagaggattgaatactgcacccaggacccggatgtaatcaacaccgctttgccgatagaatatggtccacttgtggaagaggaagagaaagtgcctgtgaggcccaaggaccctgagggggttcctcctctcctggtctctcaacaggcaaaacgggaggaggagcgcagcccagctgccccaccacctctgcctaccacctcctctggcaaggctgcaaagaaacccacagctgcagagatctctgttcgagtccctagagggccggccgtggaagggggacacgtgaatatggcattctctcagtccaaccctccttcggagttgcacaaggtccacggatccagaaacaagcccaccagcttgtggaacccaacgtacggctcctggtttacagagaaacccaccaaaaagaataatcctatagcaaagaaggagccacacgacaggggtaacctggggctggagggaagctgtactgtcccacctaacgttgcaactgggagacttccgggggcctcactgctcctagagccctcttcgctgactgccaatatgaaggaggtacctctgttcaggctacgtcacttcccttgtgggaatgtcaattacggctaccagcaacagggcttgcccttagaagccgctactgcccctggagctggtcattacgaggataccattctgaaaagcaagaatagcatgaaccagcctgggccctga

SEQ ID NO: 2 - DNA, 4518 bp, Homo sapiens
  source 1..4518: mol_type = unassigned DNA
atgtctggagaagtgcgtttgaggcagttggagcagtttattttggacgggcccgctcagaccaatgggcagtgcttcagtgtggagacattactggatatactcatctgcctttatgatgaatgcaataattctccattgagaagagagaagaacattctcgaatacctagaatgggctaaaccatttacttctaaagtgaaacaaatgcgattacatagagaagactttgaaatattaaaggtgattggtcgaggagcttttggggaggttgctgtagtaaaactaaaaaatgcagataaagtgtttgccatgaaaatattgaataaatgggaaatgctgaaaagagctgagacagcatgttttcgtgaagaaagggatgtattagtgaatggagacaataaatggattacaaccttgcactatgctttccaggatgacaataacttatacctggttatggattattatgttggtggggatttgcttactctactcagcaaatttgaagatagattgcctgaagatatggctagattttacttggctgagatggtgatagcaattgactcagttcatcagctacattatgtacacagagacattaaacctgacaatatactgatggatatgaatggacatattcggttagcagattttggttcttgtctgaagctgatggaagatggaacggttcagtcctcagtggctgtaggaactccagattatatctctcctgaaatccttcaagccatggaagatggaaaagggagatatggacctgaatgtgactggtggtctttgggggtctgtatgtatgaaatgctttacggagaaacaccattttatgcagaatcgctggtggagacatacggaaaaatcatgaaccacaaagagaggtttcagtttccagcccaagtgactgatgtgtctgaaaatgctaaggatcttattcgaaggctcatttgtagcagagaacatcgacttggtcaaaatggaatagaagactttaagaaacacccatttttcagtggaattgattgggataatattcggaactgtgaagcaccttatattccagaagttagtagcccaacagatacatcgaattttgatgtagatgatgattgtttaaaaaattctgaaacgatgcccccaccaacacatactgcattttctggccaccatctgccatttgttggttttacatatactagtagctgtgtactttctgatcggagctgtttaagagttacggctggtcccacctcactggatcttgatgttaatgttcagaggactctagacaacaacttagcaactgaagcttatgaaagaagaattaagcgccttgagcaagaaaaacttgaactcagtagaaaacttcaagagtcaacacagactgtccaagctctgcagtattcaactgttgatggtccactaacagcaagcaaagatttagaaataaaaaacttaaaagaagaaattgaaaaactaagaaaacaagtaacagaatcaagtcatttggaacagcaacttgaagaagctaatgctgtgaggcaagaactagatgatgcttttagacaaatcaaggcttatgaaaaacaaatcaaaacgttacaacaagaaagagaagatctaaataaggaactagtccaggctagtgagcgattaaaaaaccaatccaaagagctgaaagacgcacactgtcagaggaaactggccatgcaggaattcatggagatcaatgagcggctaacagaattgcacacccaaaaacagaaacttgctcgccatgtccgagataaggaagaagaggtggacctggtgatgcaaaaagttgaaagcttaaggcaagaactgcgcagaacagaaagagccaaaaaagagctggaagttcatacagaagctctagctgctgaagcatctaaagacaggaagctacgtgaacagagtgagcactattctaagcaactggaaaatgaattggagggactgaagcaaaaacaaattagttactcaccaggagtatgcagcatagaacatcagcaagagataaccaaactaaagactgatttggaaaagaaaagtatcttttatgaagaagaattatctaaaagagaaggaatacatgcaaatgaaataaaaaatcttaagaaagaactgcatgattcagaaggtcagcaacttgctctcaacaaagaaattatgattttaaaagacaaattggaaaaaaccagaagagaaagtcaaagtgaaagggaggaatttgaaagtgagttcaaacaacaatatgaacgagaaaaagtgttgttaactgaagaaaataaaaagctgacgagtgaacttgataagcttactactttgtatgagaacttaagtatacacaaccagcagttagaagaagaggttaaagatctagcagacaagaaagaatcagttgcacattgggaagcccaaatcacagaaataattcagtgggtcagcgatgaaaaggatgcacgagggtatcttcaggccttagcttctaaaatgactgaagaattggaggcattaagaaattccagcttgggtacacgagcaacagatatgccctggaaaatgcgtcgttttgcgaaactggatatgtcagctagactggagttgcagtcggctctggatgcagaaataagagccaaacaggccatccaagaagagttgaataaagttaaagcatctaatatcataacagaatgtaaactaaaagattcagagaagaagaacttggaactactctcagaaatcgaacagctgataaaggacactgaagagcttagatctgaaaaggtgtaccgccggaagcaccaggagctgcaagccatgcagatggagctgcagagccctgagtacaagctgagcaagctccgcacctcgaccatcatgaccgactacaaccccaactactgctttgctggcaagacctcctccatcagtgacctgaaggaggtgccgcggaaaaacatcaccctcattcggggtctgggccatggcgcctttggggaggtgtatgaaggccaggtgtccggaatgcccaacgacccaagccccctgcaagtggctgtgaagacgctgcctgaagtgtgctctgaacaggacgaactggatttcctcatggaagccctgatcatcagcaaattcaaccaccagaacattgttcgctgcattggggtgagcctgcaatccctgccccggttcatcctgctggagctcatggcggggggagacctcaagtccttcctccgagagacccgccctcgcccgagccagccctcctccctggccatgctggaccttctgcacgtggctcgggacattgcctgtggctgtcagtatttggaggaaaaccacttcatccaccgagacattgctgccagaaactgcctcttgacctgtccaggccctggaagagtggccaagattggagacttcgggatggcccgagacatctacagggcgagctactatagaaagggaggctgtgccatgctgccagttaagtggatgcccccagaggccttcatggaaggaatattcacttctaaaacagacacatggtcctttggagtgctgctatgggaaatcttttctcttggatatatgccataccccagcaaaagcaaccaggaagttctggagtttgtcaccagtggaggccggatggacccacccaagaactgccctgggcctgtataccggataatgactcagtgctggcaacatcagcctgaagacaggcccaactttgccatcattttggagaggattgaatactgcacccaggacccggatgtaatcaacaccgctttgccgatagaatatggtccacttgtggaagaggaagagaaagtgcctgtgaggcccaaggaccctgagggggttcctcctctcctggtctctcaacaggcaaaacgggaggaggagcgcagcccagctgccccaccacctctgcctaccacctcctctggcaaggctgcaaagaaacccacagctgcagagatctctgttcgagtccctagagggccggccgtggaagggggacacgtgaatatggcattctctcagtccaaccctccttcggagttgcacaaggtccacggatccagaaacaagcccaccagcttgtggaacccaacgtacggctcctggtttacagagaaacccaccaaaaagaataatcctatagcaaagaaggagccacacgacaggggtaacctggggctggagggaagctgtactgtcccacctaacgttgcaactgggagacttccgggggcctcactgctcctagagccctcttcgctgactgccaatatgaaggaggtacctctgttcaggctacgtcacttcccttgtgggaatgtcaattacggctaccagcaacagggcttgcccttagaagccgctactgcccctggagctggtcattacgaggataccattctgaaaagcaagaatagcatgaaccagcctgggccctga

SEQ ID NO: 3 - DNA, 2619 bp, Homo sapiens
  source 1..2619: mol_type = unassigned DNA
atggagctccaggcagcccgcgcctgcttcgccctgctgtggggctgtgcgctggccgcggccgcggcggcgcagggcaaggaagtggtactgctggactttgctgcagctggaggggagctcggctggctcacacacccgtatggcaaagggtgggacctgatgcagaacatcatgaatgacatgccgatctacatgtactccgtgtgcaacgtgatgtctggcgaccaggacaactggctccgcaccaactgggtgtaccgaggagaggctgagcgtatcttcattgagctcaagtttactgtacgtgactgcaacagcttccctggtggcgccagctcctgcaaggagactttcaacctctactatgccgagtcggacctggactacggcaccaacttccagaagcgcctgttcaccaagattgacaccattgcgcccgatgagatcaccgtcagcagcgacttcgaggcacgccacgtgaagctgaacgtggaggagcgctccgtggggccgctcacccgcaaaggcttctacctggccttccaggatatcggtgcctgtgtggcgctgctctccgtccgtgtctactacaagaagtgccccgagctgctgcagggcctggcccacttccctgagaccatcgccggctctgatgcaccttccctggccactgtggccggcacctgtgtggaccatgccgtggtgccaccggggggtgaagagccccgtatgcactgtgcagtggatggcgagtggctggtgcccattgggcagtgcctgtgccaggcaggctacgagaaggtggaggatgcctgccaggtgtcacccaccccggagccacacctgccactctcgctgatcctctctgtggtgacctctgccctcgtggccgccctggtcctggctttctccggcatcatgattgtgtaccgccggaagcaccaggagctgcaagccatgcagatggagctgcagagccctgagtacaagctgagcaagctccgcacctcgaccatcatgaccgactacaaccccaactactgctttgctggcaagacctcctccatcagtgacctgaaggaggtgccgcggaaaaacatcaccctcattcggggtctgggccatggcgcctttggggaggtgtatgaaggccaggtgtccggaatgcccaacgacccaagccccctgcaagtggctgtgaagacgctgcctgaagtgtgctctgaacaggacgaactggatttcctcatggaagccctgatcatcagcaaattcaaccaccagaacattgttcgctgcattggggtgagcctgcaatccctgccccggttcatcctgctggagctcatggcggggggagacctcaagtccttcctccgagagacccgccctcgcccgagccagccctcctccctggccatgctggaccttctgcacgtggctcgggacattgcctgtggctgtcagtatttggaggaaaaccacttcatccaccgagacattgctgccagaaactgcctcttgacctgtccaggccctggaagagtggccaagattggagacttcgggatggcccgagacatctacagggcgagctactatagaaagggaggctgtgccatgctgccagttaagtggatgcccccagaggccttcatggaaggaatattcacttctaaaacagacacatggtcctttggagtgctgctatgggaaatcttttctcttggatatatgccataccccagcaaaagcaaccaggaagttctggagtttgtcaccagtggaggccggatggacccacccaagaactgccctgggcctgtataccggataatgactcagtgctggcaacatcagcctgaagacaggcccaactttgccatcattttggagaggattgaatactgcacccaggacccggatgtaatcaacaccgctttgccgatagaatatggtccacttgtggaagaggaagagaaagtgcctgtgaggcccaaggaccctgagggggttcctcctctcctggtctctcaacaggcaaaacgggaggaggagcgcagcccagctgccccaccacctctgcctaccacctcctctggcaaggctgcaaagaaacccacagctgcagagatctctgttcgagtccctagagggccggccgtggaagggggacacgtgaatatggcattctctcagtccaaccctccttcggagttgcacaaggtccacggatccagaaacaagcccaccagcttgtggaacccaacgtacggctcctggtttacagagaaacccaccaaaaagaataatcctatagcaaagaaggagccacacgacaggggtaacctggggctggagggaagctgtactgtcccacctaacgttgcaactgggagacttccgggggcctcactgctcctagagccctcttcgctgactgccaatatgaaggaggtacctctgttcaggctacgtcacttcccttgtgggaatgtcaattacggctaccagcaacagggcttgcccttagaagccgctactgcccctggagctggtcattacgaggataccattctgaaaagcaagaatagcatgaaccagcctgggccctga

SEQ ID NO: 4 - DNA, 5412 bp, Homo sapiens
  source 1..5412: mol_type = unassigned DNA
atggcggtggccgagctgtacacgcagtacaacagggtctggattcccgatcctgaagaagtttggaagtctgctgaaatagccaaggactacagagttggtgacaaggtcctgcgactcctgctggaggatggaacggagctggattattctgtcaatccagaatctctgcctccacttcggaatcctgacatcctcgtgggcgagaatgacctcacggctctcagctatcttcacgagcccgcggtgctccacaacctcagaatccgctttgcagaatccaaactcatttacacctacagtggaatcattttggtggccatgaatccttacaagcagttgccaatatacggagatgccatcatccacgcctacagcgggcagaacatgggcgatatggacccacacatatttgccgtggcagaagaggcatacaagcagatggccagaaacaacagaaaccagtccataattgtaagtggggagtcaggtgctggaaagacagtgtcggctcgctatgccatgaggtactttgccaccgtcagcaaatcgggcagcaacgctcacgtggaagacaaggtcctggcatccaatcccatcaccgaggccgttggaaatgccaagaccacccgcaatgacaatagtagtcggtttgggaaatacacagaaatcagttttgatgaacaaaatcaaattataggagccaacatgagcacttacctcctggagaaatccagagttgtctttcaatcggaaaatgaacgaaattaccacattttctatcagctttgtgcatctgcacagcagtcggaatttaaacatcttaaattggggagtgccgaagaatttaattatacaagaatgggaggcaatactgtcattgagggtgtgaatgatcgagctgaaatggtagagactcaaaagaccttcacgcttctgggtttcaaggaggattttcagatggacgtttttaaaatcctggcagccatcctacatctgggcaatgtgcagatcaccgcggtgggcaacgagaggtcctcagttagtgaggatgacagtcacctgaaggtgttctgtgagctcctgggcctggagagtggcagagttgctcagtggctgtgcaatcgcaaaatcgtcacaagctctgagacggtggtaaaacccatgaccaggcctcaggctgtcaacgccagggatgcactggccaaaaagatctatgctcacctgttcgacttcattgtggagagaattaaccaagcgttgcagttttcaggcaagcagcacacttttattggtgttttggacatttatggttttgaaacctttgatgtgaacagctttgaacaattttgcatcaattacgctaatgaaaaactgcaacaacagtttaacatgcatgtcttcaaactggaacaagaagaatacatgaaggaagatataccttggacgctgatagatttttatgacaatcaaccagttattgacctgattgaagcaaaaatgggaattctggagttactggatgaagaatgtttgttaccacatggaactgatgaaaactggcttcaaaagctgtataataattttgtcaacaggaaccctttgtttgaaaagcctagaatgtcaaacacatcctttgtcatccagcactttgctgataaggtagagtataaatgtgaaggtttcctggagaaaaacagagacaccgtctatgacatgctggttgaaatcctgagagcaagcaagtttcatctctgtgccaacttttttcaagaaaatccaactcctccttctccttttggttcaatgattacagttaaatctgcaaagcaagtcatcaagccaaacagcaagcatttccggaccacagttgggagcaagttccgcagctctctgtacttgctcatggagaccctcaatgcgacgacgccccactacgttcgatgcatcaagccaaatgatgagaagttaccctttgaatttgactccaaaagaattgttcagcagctgcgagcctgcggcgttttagaaacgattcgcattagtgcacagagctacccttccaggtggacatacatcgagttctacagtcgctacggcattctcatgaccaagcaagagctttccttcagcgataaaaaggaggtgtgcaaggtggttttacacagactcatccaggattctaatcagtaccagtttggtaaaaccaaaattttcttcagagcaggacaagtggcttatttagagaaacttcgattggataaactgaggcagagttgtgttatggtacaaaagcacatgcgtggctggctccagaggaaaaaattcctccgagagagacgagccgccctgataatccagcagtacttccggggtcagcaaactgtgaggaaagctattactgcagtggccttaaaagaagcttgggcagccataatcattcagaagcactgccgcgggtatcttgttcgcagcctgtatcagttgattcgcatggccaccatcacaatgcaggcctacagccgaggattcctggcaaggaggaggtatcgaaagatgctggaggaacataaggctgtgatcctacagaaatacgcacgggcgtggctggccagacgcagattccagagtatccgacgattcgtgcttaatattcagcttacttacagggtccagcgtttgcagaaaaagttggaagatcagaacaaagaaaaccatgggctggtggagaagctgactagcctggctgctcttcgagctggggatgtggaaaagattcagaagctggaagcagaactagaaaaagcagccactcacaggcgaaattacgaggagaaggggaagagatacagggatgctgtggaagagaaattggcaaagcttcagaagcataattcagaactggaaacacagaaagaacaaatacagctgaagcttcaagagaagactgaagagttaaaagaaaaaatggacaacctcaccaagcagctctttgatgatgtacaaaaggaagaacggcaaagaatgcttcttgaaaaaagttttgaactgaaaacacaagactatgagaagcagattcagtctttgaaagaagaaattaaagctctcaaggatgagaagatgcaactccaacacctggtggagggggagcacgtcacttctgatggcttgaaggcggaagtggcccgcctgagcaagcaggtcaagacaatctctgagttcgaaaaagagatagaactacttcaggcacagaagatagatgtggagaaacatgtgcagtcacaaaaacgggaaatgagagaaaagatgtcagagatcaccaaacaacttctcgaaagctatgacattgaagatgtaagaagcaggctctctgtggaagatctggaacatttaaatgaggatggagaactttggtttgcttatgaaggactaaagaaagcaacacgtgttttggagagccatttccagtctcagaaggattgctatgaaaaggagattgaagctttgaacttcaaagtggtgcatctcagtcaagaaatcaaccacctgcagaagttattcagagaagaaaatgacatcaatgaaagcatccgtcatgaagttaccaggctaacatcagagaacatgatgatcccagactttaaacagcaaatttcagaattggagaaacagaagcaagatcttgaaatccgcctgaatgaacaagctgagaaaatgaaagtgtaccgccggaagcaccaggagctgcaagccatgcagatggagctgcagagccctgagtacaagctgagcaagctccgcacctcgaccatcatgaccgactacaaccccaactactgctttgctggcaagacctcctccatcagtgacctgaaggaggtgccgcggaaaaacatcaccctcattcggggtctgggccatggcgcctttggggaggtgtatgaaggccaggtgtccggaatgcccaacgacccaagccccctgcaagtggctgtgaagacgctgcctgaagtgtgctctgaacaggacgaactggatttcctcatggaagccctgatcatcagcaaattcaaccaccagaacattgttcgctgcattggggtgagcctgcaatccctgccccggttcatcctgctggagctcatggcggggggagacctcaagtccttcctccgagagacccgccctcgcccgagccagccctcctccctggccatgctggaccttctgcacgtggctcgggacattgcctgtggctgtcagtatttggaggaaaaccacttcatccaccgagacattgctgccagaaactgcctcttgacctgtccaggccctggaagagtggccaagattggagacttcgggatggcccgagacatctacagggcgagctactatagaaagggaggctgtgccatgctgccagttaagtggatgcccccagaggccttcatggaaggaatattcacttctaaaacagacacatggtcctttggagtgctgctatgggaaatcttttctcttggatatatgccataccccagcaaaagcaaccaggaagttctggagtttgtcaccagtggaggccggatggacccacccaagaactgccctgggcctgtataccggataatgactcagtgctggcaacatcagcctgaagacaggcccaactttgccatcattttggagaggattgaatactgcacccaggacccggatgtaatcaacaccgctttgccgatagaatatggtccacttgtggaagaggaagagaaagtgcctgtgaggcccaaggaccctgagggggttcctcctctcctggtctctcaacaggcaaaacgggaggaggagcgcagcccagctgccccaccacctctgcctaccacctcctctggcaaggctgcaaagaaacccacagctgcagagatctctgttcgagtccctagagggccggccgtggaagggggacacgtgaatatggcattctctcagtccaaccctccttcggagttgcacaaggtccacggatccagaaacaagcccaccagcttgtggaacccaacgtacggctcctggtttacagagaaacccaccaaaaagaataatcctatagcaaagaaggagccacacgacaggggtaacctggggctggagggaagctgtactgtcccacctaacgttgcaactgggagacttccgggggcctcactgctcctagagccctcttcgctgactgccaatatgaaggaggtacctctgttcaggctacgtcacttcccttgtgggaatgtcaattacggctaccagcaacagggcttgcccttagaagccgctactgcccctggagctggtcattacgaggataccattctgaaaagcaagaatagcatgaaccagcctgggccctga

SEQ ID NO: 5 - DNA, 3603 bp, Homo sapiens
  source 1..3603: mol_type = unassigned DNA
atggaggtggcggtggagaaggcggtggcggcggcggcagcggcctcggctgcggcctccggggggccctcggcggcgccgagcggggagaacgaggccgagagtcggcagggcccggactcggagcgcggcggcgaggcggcccggctcaacctgttggacacttgcgccgtgtgccaccagaacatccagagccgggcgcccaagctgctgccctgcctgcactctttctgccagcgctgcctgcccgcgccccagcgctacctcatgctgcccgcgcccatgctgggctcggccgagaccccgccacccgtccctgcccccggctcgccggtcagcggctcgtcgccgttcgccacccaagttggagtcattcgttgcccagtttgcagccaagaatgtgcagagagacacatcatagataacttttttgtgaaggacactactgaggttcccagcagtacagtagaaaagtcaaatcaggtatgtacaagctgtgaggacaacgcagaagccaatgggttttgtgtagagtgtgttgaatggctctgcaagacgtgtatcagagctcatcagagggtaaagttcacaaaagaccacactgtcagacagaaagaggaagtatctccagaggcagttggtgtcaccagccagcgaccagtgttttgtccttttcataaaaaggagcagctgaagctgtactgtgagacatgtgacaaactgacatgtcgagactgtcagttgttagaacataaagagcatagataccaatttatagaagaagcttttcagaatcagaaagtgatcatagatacactaatcaccaaactgatggaaaaaacaaaatacataaaattcacaggaaatcagatccaaaacagaattattgaagtaaatcaaaatcaaaagcaggtggaacaggatattaaagttgctatatttacactgatggtagaaataaataaaaaaggaaaagctctactgcatcagttagagagccttgcaaaggaccatcgcatgaaacttatgcaacaacaacaggaagtggctggactctctaaacaattggagcatgtcatgcatttttctaaatgggcagtttccagtggcagcagtacagcattactttatagcaaacgactgattacataccggttacggcacctccttcgtgcaaggtgtgatgcatccccagtgaccaacaacaccatccaatttcactgtgatcctagtttctgggctcaaaatatcatcaacttaggttctttagtaatcgaggataaagagagccagccacaaatgcctaagcagaatcctgtcgtggaacagaattcacagccaccaagtggtttatcatcaaaccagttatccaagttcccaacacagatcagcctagctcaattacggctccagcatatgcagcaacagcaaccgcctccacgtttgataaactttcagaatcacagccccaaacccaatggaccagttcttcctcctcatcctcaacaactgagatatccaccaaaccagaacataccacgacaagcaataaagccaaaccccctacagatggctttcttggctcaacaagccataaaacagtggcagatcagcagtggacagggaaccccatcaactaccaacagcacatcctctactccttccagccccacgattactagtgcagcaggatatgatggaaaggcttttggttcacctatgatcgatttgagctcaccagtgggagggtcttataatcttccctctcttccggatattgactgttcaagtactattatgctggacaatattgtgaggaaagatactaatatagatcatggccagccaagaccaccctcaaacagaacggtccagtcaccaaattcatcagtgccatctccaggccttgcagtgtaccgccggaagcaccaggagctgcaagccatgcagatggagctgcagagccctgagtacaagctgagcaagctccgcacctcgaccatcatgaccgactacaaccccaactactgctttgctggcaagacctcctccatcagtgacctgaaggaggtgccgcggaaaaacatcaccctcattcggggtctgggccatggcgcctttggggaggtgtatgaaggccaggtgtccggaatgcccaacgacccaagccccctgcaagtggctgtgaagacgctgcctgaagtgtgctctgaacaggacgaactggatttcctcatggaagccctgatcatcagcaaattcaaccaccagaacattgttcgctgcattggggtgagcctgcaatccctgccccggttcatcctgctggagctcatggcggggggagacctcaagtccttcctccgagagacccgccctcgcccgagccagccctcctccctggccatgctggaccttctgcacgtggctcgggacattgcctgtggctgtcagtatttggaggaaaaccacttcatccaccgagacattgctgccagaaactgcctcttgacctgtccaggccctggaagagtggccaagattggagacttcgggatggcccgagacatctacagggcgagctactatagaaagggaggctgtgccatgctgccagttaagtggatgcccccagaggccttcatggaaggaatattcacttctaaaacagacacatggtcctttggagtgctgctatgggaaatcttttctcttggatatatgccataccccagcaaaagcaaccaggaagttctggagtttgtcaccagtggaggccggatggacccacccaagaactgccctgggcctgtataccggataatgactcagtgctggcaacatcagcctgaagacaggcccaactttgccatcattttggagaggattgaatactgcacccaggacccggatgtaatcaacaccgctttgccgatagaatatggtccacttgtggaagaggaagagaaagtgcctgtgaggcccaaggaccctgagggggttcctcctctcctggtctctcaacaggcaaaacgggaggaggagcgcagcccagctgccccaccacctctgcctaccacctcctctggcaaggctgcaaagaaacccacagctgcagagatctctgttcgagtccctagagggccggccgtggaagggggacacgtgaatatggcattctctcagtccaaccctccttcggagttgcacaaggtccacggatccagaaacaagcccaccagcttgtggaacccaacgtacggctcctggtttacagagaaacccaccaaaaagaataatcctatagcaaagaaggagccacacgacaggggtaacctggggctggagggaagctgtactgtcccacctaacgttgcaactgggagacttccgggggcctcactgctcctagagccctcttcgctgactgccaatatgaaggaggtacctctgttcaggctacgtcacttcccttgtgggaatgtcaattacggctaccagcaacagggcttgcccttagaagccgctactgcccctggagctggtcattacgaggataccattctgaaaagcaagaatagcatgaaccagcctgggccctga

SEQ ID NO: 6 - DNA, 1869 bp, Homo sapiens
  source 1..1869: mol_type = unassigned DNA
atgcaggccgccgccctccctgaggagatccgttggctcctggaagatgctgaagagtttctggcagaaggtttgcggaatgagaacctcagcgctgttgcaagggatcacagagaccatattctacggggctttcagcaaatcaaagccaggtactattgggattttcagccccaagtgtaccgccggaagcaccaggagctgcaagccatgcagatggagctgcagagccctgagtacaagctgagcaagctccgcacctcgaccatcatgaccgactacaaccccaactactgctttgctggcaagacctcctccatcagtgacctgaaggaggtgccgcggaaaaacatcaccctcattcggggtctgggccatggcgcctttggggaggtgtatgaaggccaggtgtccggaatgcccaacgacccaagccccctgcaagtggctgtgaagacgctgcctgaagtgtgctctgaacaggacgaactggatttcctcatggaagccctgatcatcagcaaattcaaccaccagaacattgttcgctgcattggggtgagcctgcaatccctgccccggttcatcctgctggagctcatggcggggggagacctcaagtccttcctccgagagacccgccctcgcccgagccagccctcctccctggccatgctggaccttctgcacgtggctcgggacattgcctgtggctgtcagtatttggaggaaaaccacttcatccaccgagacattgctgccagaaactgcctcttgacctgtccaggccctggaagagtggccaagattggagacttcgggatggcccgagacatctacagggcgagctactatagaaagggaggctgtgccatgctgccagttaagtggatgcccccagaggccttcatggaaggaatattcacttctaaaacagacacatggtcctttggagtgctgctatgggaaatcttttctcttggatatatgccataccccagcaaaagcaaccaggaagttctggagtttgtcaccagtggaggccggatggacccacccaagaactgccctgggcctgtataccggataatgactcagtgctggcaacatcagcctgaagacaggcccaactttgccatcattttggagaggattgaatactgcacccaggacccggatgtaatcaacaccgctttgccgatagaatatggtccacttgtggaagaggaagagaaagtgcctgtgaggcccaaggaccctgagggggttcctcctctcctggtctctcaacaggcaaaacgggaggaggagcgcagcccagctgccccaccacctctgcctaccacctcctctggcaaggctgcaaagaaacccacagctgcagagatctctgttcgagtccctagagggccggccgtggaagggggacacgtgaatatggcattctctcagtccaaccctccttcggagttgcacaaggtccacggatccagaaacaagcccaccagcttgtggaacccaacgtacggctcctggtttacagagaaacccaccaaaaagaataatcctatagcaaagaaggagccacacgacaggggtaacctggggctggagggaagctgtactgtcccacctaacgttgcaactgggagacttccgggggcctcactgctcctagagccctcttcgctgactgccaatatgaaggaggtacctctgttcaggctacgtcacttcccttgtgggaatgtcaattacggctaccagcaacagggcttgcccttagaagccgctactgcccctggagctggtcattacgaggataccattctgaaaagcaagaatagcatgaaccagcctgggccctga

SEQ ID NO: 7 - DNA, 2631 bp, Homo sapiens
  source 1..2631: mol_type = unassigned DNA
atgttcaccctgtctcagacctcgagagcatggttcatcgatagagcccgtcaggcacgagaagaaaggcttgtgcagaaggaacgggagcgggcagctgttgtgatccaggcccatgtccggagttttctctgtcggagtcgactgcagagagatatcaggagagagattgatgacttttttaaagcagatgaccctgagtccactaaaagaagtgcactttgtattttcaagattgccaggaaactgctgttcctattcagaatcaaagaggataatgagagatttgagaagttgtgtcgcagcatcctgagcagcatggatgctgagaatgagcctaaggtgtggtatgtgtccctggcttgttctaaggacctcaccctcctttggattcaacagatcaagaacattttgtggtactgctgtgattttctcaagcagctcaagcctgaaatcctgcaggactcccgactcatcaccctgtacctcacgatgcttgtcaccttcacagacacttcaacgtggaaaattcttcggggaaaaggtgaaagtcttcgaccagcgatgaaccacatttgtgcaaatataatgggacatctcaaccagcatggattttattctgtgctgcagatattgttaacccgtggcctggcaagaccccgtccttgtctatccaaaggcactttaacagcagctttttctctagcgttacgccctgtgattgctgcacagttctcagacaatctgattcggccgttcctcatccacatcatgtctgtgcctgctctggtgactcatctcagcacagtgacccctgagcgcctcactgttttagaatcccatgacatgcttcgtaaattcatcatatttttaagagaccaagatcgatgccgtgatgtatgtgaaagtttagaaggatgccatacgctttgtctaatggtgtaccgccggaagcaccaggagctgcaagccatgcagatggagctgcagagccctgagtacaagctgagcaagctccgcacctcgaccatcatgaccgactacaaccccaactactgctttgctggcaagacctcctccatcagtgacctgaaggaggtgccgcggaaaaacatcaccctcattcggggtctgggccatggcgcctttggggaggtgtatgaaggccaggtgtccggaatgcccaacgacccaagccccctgcaagtggctgtgaagacgctgcctgaagtgtgctctgaacaggacgaactggatttcctcatggaagccctgatcatcagcaaattcaaccaccagaacattgttcgctgcattggggtgagcctgcaatccctgccccggttcatcctgctggagctcatggcggggggagacctcaagtccttcctccgagagacccgccctcgcccgagccagccctcctccctggccatgctggaccttctgcacgtggctcgggacattgcctgtggctgtcagtatttggaggaaaaccacttcatccaccgagacattgctgccagaaactgcctcttgacctgtccaggccctggaagagtggccaagattggagacttcgggatggcccgagacatctacagggcgagctactatagaaagggaggctgtgccatgctgccagttaagtggatgcccccagaggccttcatggaaggaatattcacttctaaaacagacacatggtcctttggagtgctgctatgggaaatcttttctcttggatatatgccataccccagcaaaagcaaccaggaagttctggagtttgtcaccagtggaggccggatggacccacccaagaactgccctgggcctgtataccggataatgactcagtgctggcaacatcagcctgaagacaggcccaactttgccatcattttggagaggattgaatactgcacccaggacccggatgtaatcaacaccgctttgccgatagaatatggtccacttgtggaagaggaagagaaagtgcctgtgaggcccaaggaccctgagggggttcctcctctcctggtctctcaacaggcaaaacgggaggaggagcgcagcccagctgccccaccacctctgcctaccacctcctctggcaaggctgcaaagaaacccacagctgcagagatctctgttcgagtccctagagggccggccgtggaagggggacacgtgaatatggcattctctcagtccaaccctccttcggagttgcacaaggtccacggatccagaaacaagcccaccagcttgtggaacccaacgtacggctcctggtttacagagaaacccaccaaaaagaataatcctatagcaaagaaggagccacacgacaggggtaacctggggctggagggaagctgtactgtcccacctaacgttgcaactgggagacttccgggggcctcactgctcctagagccctcttcgctgactgccaatatgaaggaggtacctctgttcaggctacgtcacttcccttgtgggaatgtcaattacggctaccagcaacagggcttgcccttagaagccgctactgcccctggagctggtcattacgaggataccattctgaaaagcaagaatagcatgaaccagcctgggccctga

SEQ ID NO: 8 - DNA, 5463 bp, Homo sapiens
  source 1..5463: mol_type = unassigned DNA
atggaggagggccatgggctggacctcacttacatcacggagcgcatcatcgctgtgtccttccctgccggctgctctgaggagtcctacctgcacaacctacaggaggtcacgcgcatgctcaagtccaagcacggggacaactacctggtattaaacctttcagaaaagagatatgaccttacgaagcttaacccaaagatcatggatgtgggctggccagagctccacgcaccgcccctggataagatgtgtaccatatgcaaggcgcaggagtcctggctgaacagcaacctccagcatgtggtcgtcattcactgcaggggcgggaaaggacgcataggagtggtcatatcatcctacatgcatttcaccaacgtctcagccagcgccgaccaggcccttgacaggtttgcaatgaagaagttttatgatgacaaagtttcagctttaatgcagccttcccaaaaacggtatgttcagttcctcagtgggctcctgtccggatcggtgaaaatgaatgcctctcccctgttcctgcattttgtcatcctccacggcacccccaacttcgacacaggtggagtgtgccggccctttctgaagctctaccaagccatgcagcctgtgtacacctccgggatctacaacgttggcccagaaaaccccagcaggatctgcatcgtcatcgagccggcccagcttctgaagggagatgtcatggtgaaatgctaccacaagaaataccgctcggccacccgtgacgtcattttccgcctgcagtttcacactggggctgtgcagggctacgggctggtgtttgggaaggaggatctggacaatgccagcaaagatgaccgttttcctgactatgggaaggttgaattagtcttctctgccacgcctgagaagattcaagggtccgaacacttgtacaacgaccacggtgtgattgtggactacaacacaacagacccactgatacgctgggactcgtacgagaacctcagtgcagatggagaagtgctacacacgcagggccctgtcgatggcagcctttacgcgaaggtgaggaagaaaagctcctcggatcctggcatcccaggtggcccccaggcaatcccggccaccaacagcccagaccacagtgaccacaccttgtctgtcagcagtgactccggccactctacagcctctgccaggacggataagacggaagagcgcctggccccaggaaccaggaggggcctgagtgcccaggagaaggcagagttggaccagctgctcagtggctttggcctggaagatcctggaagctccctcaaggaaatgactgatgctcgaagcaagtacagtgggacccgccacgtggtgccagcccaggttcacgtgaatggagacgctgctctgaaggatcgggagacagacattctggatgacgagatgccccaccacgacctgcacagtgtggacagccttgggaccctgtcctcctcggaagggcctcagtcggcccacctgggtcccttcacctgccacaagagcagccagaactcactcctatctgacggttttggcagcaacgttggtgaagatccgcagggcaccctcgttccggacctgggccttggcatggacggcccctatgagcgggagcggacttttgggagtcgagagcccaagcagccccagcccctgctgagaaagccctcagtgtccgcccagatgcaggcctatgggcagagcagctactccacacagacctgggtgcgccagcagcagatggttgtagctcaccagtatagcttcgccccagatggggaggcccggctggtgagccgctgccctgcagacaatcctggcctcgtccaggcccagcccagagtgccactcacccccacccgagggaccagcagtagggtggctgtccagaggggtgtaggcagtgggccacatccccctgacacacagcagccctctcccagcaaagcgttcaaacccaggtttccaggagaccaggttgtgaatggagccggcccagagctgagcacaggcccctccccaggctcgcccaccctggacatcgaccagtccatcgagcagctcaacaggctgatcctggagctggatcccaccttcgagcccatccctacccacatgaacgccctcggtagccaggccaatggctctgtgtctccagacagcgtgggaggtgggctccgggcaagcagcaggctgcctgacacaggagagggccccagcagggccaccgggcggcaaggctcctctgctgaacagcccctgggcgggagactcaggaagctgagcctggggcagtacgacaacgatgctggggggcagctgcccttctccaaatgtgcatggggaaaggctggtgtggactatgccccaaacctgccgccattcccctcaccagcggacgtcaaagagacgatgacccctggctatccccaggacctcgatattatcgatggcagaattttaagtagcaaggagtccatgtgttcaactccagcatttcctgtgtctccagagacaccgtatgtgaaaacagcgctgcgccatcctccgttcagcccacctgagcccccgctgagcagcccagccagtcagcacaaaggaggacgtgaaccacgaagctgccctgagacgctcactcacgctgtggggatgtcagagagccccatcggacccaaatccacgatgctccgggctgatgcgtcctcgacgccctcctttcagcaggcttttgcttcttcctgcaccatttccagcaacggccctgggcagaggagagagagctcctcttctgcagaacgccagtgggtggagagcagccccaagcccatggtttccctgctggggagcggccggcccaccggaagtcccctcagcgctgagttctccggtaccaggaaggactccccagtgctgtcctgcttcccgccgtcagagctccaggctcctttccacagccatgagctgtccctagcagagccaccggactccctggcgcctcccagcagccaggccttcctgggcttcggcaccgccccagtgggaagtggccttccgcccgaggaggacctgggggccttgctggccaattctcatggagcgtcaccgacccccagcatcccgctgacagcgacaggggctgccgacaatggcttcctgtcccacaactttctcacggtggcgcctggacacagcagccaccacagtccaggcctgcagggccagggtgtgaccctgcccgggcagccacccctccctgagaagaagcgggcctcggagggggatcgttctttgggctcagtctctccctcctccagtggcttctccagcccgcacagcgggagcaccatcagtatccccttcccaaatgtccttcccgacttttccaaggcttcagaagcggcctcacctctgccagatagtccaggtgataaacttgtgatcgtgaaatttgttcaagacacttccaagttctggtacaaggcggatatttcaagagaacaagccatcgccatgttgaaggacaaggagccgggctcattcattgttcgagacagccattccttccgaggggcctatggcctggccatgaaggtggccacgcccccaccttcagtcctgcagctgaacaagaaagctggagatttggccaatgaactcgtccggcactttttgatcgagtgtaccccgaagggagtgcggttgaaagggtgctcgaatgaaccatatttcgtgtaccgccggaagcaccaggagctgcaagccatgcagatggagctgcagagccctgagtacaagctgagcaagctccgcacctcgaccatcatgaccgactacaaccccaactactgctttgctggcaagacctcctccatcagtgacctgaaggaggtgccgcggaaaaacatcaccctcattcggggtctgggccatggcgcctttggggaggtgtatgaaggccaggtgtccggaatgcccaacgacccaagccccctgcaagtggctgtgaagacgctgcctgaagtgtgctctgaacaggacgaactggatttcctcatggaagccctgatcatcagcaaattcaaccaccagaacattgttcgctgcattggggtgagcctgcaatccctgccccggttcatcctgctggagctcatggcggggggagacctcaagtccttcctccgagagacccgccctcgcccgagccagccctcctccctggccatgctggaccttctgcacgtggctcgggacattgcctgtggctgtcagtatttggaggaaaaccacttcatccaccgagacattgctgccagaaactgcctcttgacctgtccaggccctggaagagtggccaagattggagacttcgggatggcccgagacatctacagggcgagctactatagaaagggaggctgtgccatgctgccagttaagtggatgcccccagaggccttcatggaaggaatattcacttctaaaacagacacatggtcctttggagtgctgctatgggaaatcttttctcttggatatatgccataccccagcaaaagcaaccaggaagttctggagtttgtcaccagtggaggccggatggacccacccaagaactgccctgggcctgtataccggataatgactcagtgctggcaacatcagcctgaagacaggcccaactttgccatcattttggagaggattgaatactgcacccaggacccggatgtaatcaacaccgctttgccgatagaatatggtccacttgtggaagaggaagagaaagtgcctgtgaggcccaaggaccctgagggggttcctcctctcctggtctctcaacaggcaaaacgggaggaggagcgcagcccagctgccccaccacctctgcctaccacctcctctggcaaggctgcaaagaaacccacagctgcagagatctctgttcgagtccctagagggccggccgtggaagggggacacgtgaatatggcattctctcagtccaaccctccttcggagttgcacaaggtccacggatccagaaacaagcccaccagcttgtggaacccaacgtacggctcctggtttacagagaaacccaccaaaaagaataatcctatagcaaagaaggagccacacgacaggggtaacctggggctggagggaagctgtactgtcccacctaacgttgcaactgggagacttccgggggcctcactgctcctagagccctcttcgctgactgccaatatgaaggaggtacctctgttcaggctacgtcacttcccttgtgggaatgtcaattacggctaccagcaacagggcttgcccttagaagccgctactgcccctggagctggtcattacgaggataccattctgaaaagcaagaatagcatgaaccagcctgggccctga

SEQ ID NO: 9 - DNA, 2079 bp, Homo sapiens
  source 1..2079: mol_type = unassigned DNA
atggaggaaaaggaagataagcatcaacagcataaaatagaggatgctgctataacatatgtaagtgaaaatgaagaaattaaacacgaagaaaaacctggaaaaagcatacatcattcaaaatcacatgttggaagaggacgtatatattatgctaaattcattaacacaaatgcaagaacatacaatgaaccatttccctacatagatcccaaaaaagggccagaaatacagggtgactggtggtcacatggtaaagcactggaacctgtcttcctaccaccttacgactctaagagcacccagaggagtgacttccaaaaaccatcgtgtccactggttttgccagtcaaacacagcaagatgcaaaagccttcttgtggaatagtgtaccgccggaagcaccaggagctgcaagccatgcagatggagctgcagagccctgagtacaagctgagcaagctccgcacctcgaccatcatgaccgactacaaccccaactactgctttgctggcaagacctcctccatcagtgacctgaaggaggtgccgcggaaaaacatcaccctcattcggggtctgggccatggcgcctttggggaggtgtatgaaggccaggtgtccggaatgcccaacgacccaagccccctgcaagtggctgtgaagacgctgcctgaagtgtgctctgaacaggacgaactggatttcctcatggaagccctgatcatcagcaaattcaaccaccagaacattgttcgctgcattggggtgagcctgcaatccctgccccggttcatcctgctggagctcatggcggggggagacctcaagtccttcctccgagagacccgccctcgcccgagccagccctcctccctggccatgctggaccttctgcacgtggctcgggacattgcctgtggctgtcagtatttggaggaaaaccacttcatccaccgagacattgctgccagaaactgcctcttgacctgtccaggccctggaagagtggccaagattggagacttcgggatggcccgagacatctacagggcgagctactatagaaagggaggctgtgccatgctgccagttaagtggatgcccccagaggccttcatggaaggaatattcacttctaaaacagacacatggtcctttggagtgctgctatgggaaatcttttctcttggatatatgccataccccagcaaaagcaaccaggaagttctggagtttgtcaccagtggaggccggatggacccacccaagaactgccctgggcctgtataccggataatgactcagtgctggcaacatcagcctgaagacaggcccaactttgccatcattttggagaggattgaatactgcacccaggacccggatgtaatcaacaccgctttgccgatagaatatggtccacttgtggaagaggaagagaaagtgcctgtgaggcccaaggaccctgagggggttcctcctctcctggtctctcaacaggcaaaacgggaggaggagcgcagcccagctgccccaccacctctgcctaccacctcctctggcaaggctgcaaagaaacccacagctgcagagatctctgttcgagtccctagagggccggccgtggaagggggacacgtgaatatggcattctctcagtccaaccctccttcggagttgcacaaggtccacggatccagaaacaagcccaccagcttgtggaacccaacgtacggctcctggtttacagagaaacccaccaaaaagaataatcctatagcaaagaaggagccacacgacaggggtaacctggggctggagggaagctgtactgtcccacctaacgttgcaactgggagacttccgggggcctcactgctcctagagccctcttcgctgactgccaatatgaaggaggtacctctgttcaggctacgtcacttcccttgtgggaatgtcaattacggctaccagcaacagggcttgcccttagaagccgctactgcccctggagctggtcattacgaggataccattctgaaaagcaagaatagcatgaaccagcctgggccctga

SEQ ID NO: 10 - DNA, 2457 bp, Homo sapiens
  source 1..2457: mol_type = unassigned DNA
atggatgcactggtagaagatgatatctgtattctgaatcatgaaaaagcccataagagagatacagtgactccagtttcaatatattcaggagatgaatctgttgcttcccattttgctcttgtcactgcatatgaagacatcaaaaaacgacttaaggattcagagaaagagaactctttgttaaagaagagaataagatttttggaagaaaagctaatagctcgatttgaagaagaaacaagttccgtgggacgagaacaagtaaataaggcctatcatgcatatcgagaggtttgcattgatagagataatttgaagagcaaactggacaaaatgaataaagacaactctgaatctttgaaagtattgaatgagcagctacaatctaaagaagtagaactcctccagctgaggacagaggtggaaactcagcaggtgatgaggaatttaaatccaccttcatcaaactgggaggtggaaaagttgagctgtgacctgaagatccatggtttggaacaagagctggaactgatgaggaaagaatgtagcgatctcaaaatagaactacagaaagccaaacaaacggatccatatcaggaagacaatctgaagagcagagatctccaaaaactaagcatttcaagtgataatatgcagcatgcatactgggaactgaagagagaaatgtctaatttacatctggtgactcaagtacaagctgaactactaagaaaactgaaaacctcaactgcaatcaagaaagtgtaccgccggaagcaccaggagctgcaagccatgcagatggagctgcagagccctgagtacaagctgagcaagctccgcacctcgaccatcatgaccgactacaaccccaactactgctttgctggcaagacctcctccatcagtgacctgaaggaggtgccgcggaaaaacatcaccctcattcggggtctgggccatggcgcctttggggaggtgtatgaaggccaggtgtccggaatgcccaacgacccaagccccctgcaagtggctgtgaagacgctgcctgaagtgtgctctgaacaggacgaactggatttcctcatggaagccctgatcatcagcaaattcaaccaccagaacattgttcgctgcattggggtgagcctgcaatccctgccccggttcatcctgctggagctcatggcggggggagacctcaagtccttcctccgagagacccgccctcgcccgagccagccctcctccctggccatgctggaccttctgcacgtggctcgggacattgcctgtggctgtcagtatttggaggaaaaccacttcatccaccgagacattgctgccagaaactgcctcttgacctgtccaggccctggaagagtggccaagattggagacttcgggatggcccgagacatctacagggcgagctactatagaaagggaggctgtgccatgctgccagttaagtggatgcccccagaggccttcatggaaggaatattcacttctaaaacagacacatggtcctttggagtgctgctatgggaaatcttttctcttggatatatgccataccccagcaaaagcaaccaggaagttctggagtttgtcaccagtggaggccggatggacccacccaagaactgccctgggcctgtataccggataatgactcagtgctggcaacatcagcctgaagacaggcccaactttgccatcattttggagaggattgaatactgcacccaggacccggatgtaatcaacaccgctttgccgatagaatatggtccacttgtggaagaggaagagaaagtgcctgtgaggcccaaggaccctgagggggttcctcctctcctggtctctcaacaggcaaaacgggaggaggagcgcagcccagctgccccaccacctctgcctaccacctcctctggcaaggctgcaaagaaacccacagctgcagagatctctgttcgagtccctagagggccggccgtggaagggggacacgtgaatatggcattctctcagtccaaccctccttcggagttgcacaaggtccacggatccagaaacaagcccaccagcttgtggaacccaacgtacggctcctggtttacagagaaacccaccaaaaagaataatcctatagcaaagaaggagccacacgacaggggtaacctggggctggagggaagctgtactgtcccacctaacgttgcaactgggagacttccgggggcctcactgctcctagagccctcttcgctgactgccaatatgaaggaggtacctctgttcaggctacgtcacttcccttgtgggaatgtcaattacggctaccagcaacagggcttgcccttagaagccgctactgcccctggagctggtcattacgaggataccattctgaaaagcaagaatagcatgaaccagcctgggccctga

SEQ ID NO: 11 - DNA, 3705 bp, Homo sapiens
  source 1..3705: mol_type = unassigned DNA
atgcgcctccacctgctcctgctgctcgcgctgtgcggtgcaggcaccaccgccgcggagctcagttacagcttgcgtggcaactggagcatctgcaatgggaacggctcgctggagctgcccggggcggtccctggctgcgtgcacagcgccttgttccagcagggcctgatccaggattcttactacagatttaatgaccttaactacagatgggtctctttggataactggacctatagcaaagaatttaaaatcccctttgaaattagcaaatggcaaaaagtaaatttgattcttgagggagtggatacggtttcaaaaatcctgttcaatgaagtcactattggggaaacagacaatatgttcaatagatatagctttgatattaccaacgtggtcagggacgtgaactccattgagctgcgtttccagtcagcggtgttgtatgcagcacagcagagcaaagctcacactcgctaccaggttcccccagactgccctccacttgtgcagaagggtgaatgccatgtcaactttgttcggaaggagcaatgttcctttagttgggactgggggccttcctttcctacccagggaatctggaaagatgttagaattgaagcctataatatttgtcacctgaactacttcacattttccccaatatatgataagagtgcccaggagtggaatctggaaatagagtctacatttgatgttgtcagctcaaagccagttggtggtcaagtgatcgtagccatccctaagttgcaaacacaacagacatacagcattgaacttcaacctgggaaaaggattgttgagctatttgtgaacattagcaagaatattactgtagaaacttggtggcctcatggacatggaaaccagactgggtacaacatgactgttctttttgaactggatggaggcttaaatattgaaaaatcagctaaggtttattttaggacagtggaacttatagaagagcctataaaagggtctcctggtttgagtttctatttcaaaattaatggatttcccatatttctaaaaggctcaaactggatcccagcagattcattccaggaccgagtaacctctgagttgttacggctccttttacagtctgttgtggatgctaatatgaatactcttcgggtttggggaggaggaatttatgagcaggatgaattctatgaactctgtgatgaactaggaataatggtatggcaggattttatgtttgcctgtgccctttatccaactgatcagggcttcctggattcagtgacagcagaagttgcctaccagatcaagagactgaaatctcatccttctatcatcatatggagtggcaataatgaaaatgaggaggcgctgatgatgaattggtatcatatcagtttcactgaccggccaatctacatcaaggactatgtgacactctatgtgaaaaacatcagagagctcgtactggcaggagacaagagtcgtccttttattacgtccagtcctacaaatggggctgaaactgttgcagaagcctgggtctctcaaaaccctaatagcaattattttggtgatgtacatttttatgactatatcagtgattgctggaactggaaagttttcccaaaagctcgatttgcatctgaatatggatatcagtcctggccgtccttcagtacattagaaaaggtctcgtctacagaggactggtctttcaatagcaagttttcacttcatcgacaacatcacgaaggtggtaacaaacaaatgctttatcaggctggacttcatttcaaactcccccaaagcacagatccattacgcacatttaaagataccatctaccttactcaggtgatgcaggcccagtgtgtcaaaacagaaactgaattctaccgccgtagtcgcagcgagatagtggatcagcaagggcacacgatgggggcactttattggcagttgaatgacatctggcaagctccttcctgggcttctcttgtgtaccgccggaagcaccaggagctgcaagccatgcagatggagctgcagagccctgagtacaagctgagcaagctccgcacctcgaccatcatgaccgactacaaccccaactactgctttgctggcaagacctcctccatcagtgacctgaaggaggtgccgcggaaaaacatcaccctcattcggggtctgggccatggcgcctttggggaggtgtatgaaggccaggtgtccggaatgcccaacgacccaagccccctgcaagtggctgtgaagacgctgcctgaagtgtgctctgaacaggacgaactggatttcctcatggaagccctgatcatcagcaaattcaaccaccagaacattgttcgctgcattggggtgagcctgcaatccctgccccggttcatcctgctggagctcatggcggggggagacctcaagtccttcctccgagagacccgccctcgcccgagccagccctcctccctggccatgctggaccttctgcacgtggctcgggacattgcctgtggctgtcagtatttggaggaaaaccacttcatccaccgagacattgctgccagaaactgcctcttgacctgtccaggccctggaagagtggccaagattggagacttcgggatggcccgagacatctacagggcgagctactatagaaagggaggctgtgccatgctgccagttaagtggatgcccccagaggccttcatggaaggaatattcacttctaaaacagacacatggtcctttggagtgctgctatgggaaatcttttctcttggatatatgccataccccagcaaaagcaaccaggaagttctggagtttgtcaccagtggaggccggatggacccacccaagaactgccctgggcctgtataccggataatgactcagtgctggcaacatcagcctgaagacaggcccaactttgccatcattttggagaggattgaatactgcacccaggacccggatgtaatcaacaccgctttgccgatagaatatggtccacttgtggaagaggaagagaaagtgcctgtgaggcccaaggaccctgagggggttcctcctctcctggtctctcaacaggcaaaacgggaggaggagcgcagcccagctgccccaccacctctgcctaccacctcctctggcaaggctgcaaagaaacccacagctgcagagatctctgttcgagtccctagagggccggccgtggaagggggacacgtgaatatggcattctctcagtccaaccctccttcggagttgcacaaggtccacggatccagaaacaagcccaccagcttgtggaacccaacgtacggctcctggtttacagagaaacccaccaaaaagaataatcctatagcaaagaaggagccacacgacaggggtaacctggggctggagggaagctgtactgtcccacctaacgttgcaactgggagacttccgggggcctcactgctcctagagccctcttcgctgactgccaatatgaaggaggtacctctgttcaggctacgtcacttcccttgtgggaatgtcaattacggctaccagcaacagggcttgcccttagaagccgctactgcccctggagctggtcattacgaggataccattctgaaaagcaagaatagcatgaaccagcctgggccctga

SEQ ID NO: 12 - DNA, 1878 bp, Homo sapiens
  source 1..1878: mol_type = unassigned DNA
atggattctttaccacggctgaccagcgttttgactttgctgttctctggcttgtggcatttaggattaacagcgacaaactacaactgtgatgatccactagcatccctgctctctccaatggctttttccagttcctcagacctcactggcactcacagcccagctcaactcaactggagagttgtgtaccgccggaagcaccaggagctgcaagccatgcagatggagctgcagagccctgagtacaagctgagcaagctccgcacctcgaccatcatgaccgactacaaccccaactactgctttgctggcaagacctcctccatcagtgacctgaaggaggtgccgcggaaaaacatcaccctcattcggggtctgggccatggcgcctttggggaggtgtatgaaggccaggtgtccggaatgcccaacgacccaagccccctgcaagtggctgtgaagacgctgcctgaagtgtgctctgaacaggacgaactggatttcctcatggaagccctgatcatcagcaaattcaaccaccagaacattgttcgctgcattggggtgagcctgcaatccctgccccggttcatcctgctggagctcatggcggggggagacctcaagtccttcctccgagagacccgccctcgcccgagccagccctcctccctggccatgctggaccttctgcacgtggctcgggacattgcctgtggctgtcagtatttggaggaaaaccacttcatccaccgagacattgctgccagaaactgcctcttgacctgtccaggccctggaagagtggccaagattggagacttcgggatggcccgagacatctacagggcgagctactatagaaagggaggctgtgccatgctgccagttaagtggatgcccccagaggccttcatggaaggaatattcacttctaaaacagacacatggtcctttggagtgctgctatgggaaatcttttctcttggatatatgccataccccagcaaaagcaaccaggaagttctggagtttgtcaccagtggaggccggatggacccacccaagaactgccctgggcctgtataccggataatgactcagtgctggcaacatcagcctgaagacaggcccaactttgccatcattttggagaggattgaatactgcacccaggacccggatgtaatcaacaccgctttgccgatagaatatggtccacttgtggaagaggaagagaaagtgcctgtgaggcccaaggaccctgagggggttcctcctctcctggtctctcaacaggcaaaacgggaggaggagcgcagcccagctgccccaccacctctgcctaccacctcctctggcaaggctgcaaagaaacccacagctgcagagatctctgttcgagtccctagagggccggccgtggaagggggacacgtgaatatggcattctctcagtccaaccctccttcggagttgcacaaggtccacggatccagaaacaagcccaccagcttgtggaacccaacgtacggctcctggtttacagagaaacccaccaaaaagaataatcctatagcaaagaaggagccacacgacaggggtaacctggggctggagggaagctgtactgtcccacctaacgttgcaactgggagacttccgggggcctcactgctcctagagccctcttcgctgactgccaatatgaaggaggtacctctgttcaggctacgtcacttcccttgtgggaatgtcaattacggctaccagcaacagggcttgcccttagaagccgctactgcccctggagctggtcattacgaggataccattctgaaaagcaagaatagcatgaaccagcctgggccctga

SEQ ID NO: 13 - skipped

SEQ ID NO: 14 - DNA, 4290 bp, Homo sapiens
  source 1..4290: mol_type = unassigned DNA
atggcggcccgacaggccgtgggcagcggggctcaggagacatgcggtctggatcggattttggaggcattgaagctgctgctgagcccgggaggtcatagctccttggaatcaccaacaaacatgccttctccttctcctgattattttacatggaatctcacctggataatgaaagactccttccctttcctgtctcatcgcagccgatatggtctggagtgcagctttgacttcccctgtgagctggagtattcccctccactgcatgacctcaggaaccagagctggtcctggcgccgcatcccctccgaggaggcctcccagatggacttgctggatgggcctggggcagagcgttctaaggagatgcccagaggctcctttctccttctcaacacctcagctgactccaagcacaccatcctgagtccgtggatgaggagcagcagtgagcactgcacactggccgtctcggtgcacaggcacctgcagccctctggaaggtacattgcccagctgctgccccacaacgaggctgcaagagagatcctcctgatgcccactccagggaagcatggttggacagtgctccagggaagaatcgggcgtccagacaacccatttcgagtggccctggaatacatctccagtggaaaccgcagcttgtctgcagtggacttctttgccctgaagaactgcagtgaaggaacatccccaggctccaagatggccctgcagagctccttcacttgttggaatgggacagtcctccagcttgggcaggcctgtgacttccaccaggactgtgcccagggagaagatgagagccagatgtgccggaaactgcctgtgggtttttactgcaactttgaagatggcttctgtggctggacccaaggcacactgtcaccccacactcctcaatggcaggtcaggaccctaaaggatgcccggttccaggaccaccaagaccatgctctattgctcagtaccactgatgtccccgcttctgaaagtgctacagtgaccagtgctacgtttcctgcaccgatcaagagctctccatgtgagctccgaatgtcctggctcattcgtggagtcttgaggggaaacgtgtccttggtgctagtggagaacaaaaccgggaaggagcaaggcaggatggtctggcatgtcgccgcctatgaaggcttgagcctgtggcagtggatggtgttgcctctcctcgatgtgtctgacaggttctggctgcagatggtcgcatggtggggacaaggatccagagccatcgtggcttttgacaatatctccatcagcctggactgctacctcaccattagcggagaggacaagatcctgcagaatacagcacccaaatcaagaaacctgtttgagagaaacccaaacaaggagctgaaacccggggaaaattcaccaagacagacccccatctttgaccctacagttcattggctgttcaccacatgtggggccagcgggccccatggccccacccaggcacagtgcaacaacgcctaccagaactccaacctgagcgtggaggtggggagcgagggccccctgaaaggcatccagatctggaaggtgccagccaccgacacctacagcatctcgggctacggagctgctggcgggaaaggcgggaagaacaccatgatgcggtcccacggcgtgtctgtgctgggcatcttcaacctggagaaggatgacatgctgtacatcctggttgggcagcagggagaggacgcctgccccagtacaaaccagttaatccagaaagtctgcattggagagaacaatgtgatagaagaagaaatccgtgtgaacagaagcgtgcatgagtgggcaggaggcggaggaggagggggtggagccacctacgtatttaagatgaaggatggagtgccggtgcccctgatcattgcagccggaggtggtggcagggcctacggggccaagacagacacgttccacccagagagactggagaataactcctcggttctagggctaaacggcaattccggagccgcaggtggtggaggtggctggaatgataacacttccttgctctgggccggaaaatctttgcaggagggtgccaccggaggacattcctgcccccaggccatgaagaagtgggggtgggagacaagagggggtttcggagggggtggaggggggtgctcctcaggtggaggaggcggaggatatataggcggcaatgcagcctcaaacaatgaccccgaaatggatggggaagatggggtttccttcatcagtccactgggcatcctgtacaccccagctttaaaagtgatggaaggccacggggaagtgaatattaagcattatctaaactgcagtcactgtgaggtagacgaatgtcacatggaccctgaaagccacaaggtcatctgcttctgtgaccacgggacggtgctggctgaggatggcgtctcctgcattgtgtcacccaccccggagccacacctgccactctcgctgatcctctctgtggtgacctctgccctcgtggccgccctggtcctggctttctccggcatcatgattgtgtaccgccggaagcaccaggagctgcaagccatgcagatggagctgcagagccctgagtacaagctgagcaagctccgcacctcgaccatcatgaccgactacaaccccaactactgctttgctggcaagacctcctccatcagtgacctgaaggaggtgccgcggaaaaacatcaccctcattcggggtctgggccatggcgcctttggggaggtgtatgaaggccaggtgtccggaatgcccaacgacccaagccccctgcaagtggctgtgaagacgctgcctgaagtgtgctctgaacaggacgaactggatttcctcatggaagccctgatcatcagcaaattcaaccaccagaacattgttcgctgcattggggtgagcctgcaatccctgccccggttcatcctgctggagctcatggcggggggagacctcaagtccttcctccgagagacccgccctcgcccgagccagccctcctccctggccatgctggaccttctgcacgtggctcgggacattgcctgtggctgtcagtatttggaggaaaaccacttcatccaccgagacattgctgccagaaactgcctcttgacctgtccaggccctggaagagtggccaagattggagacttcgggatggcccgagacatctacagggcgagctactatagaaagggaggctgtgccatgctgccagttaagtggatgcccccagaggccttcatggaaggaatattcacttctaaaacagacacatggtcctttggagtgctgctatgggaaatcttttctcttggatatatgccataccccagcaaaagcaaccaggaagttctggagtttgtcaccagtggaggccggatggacccacccaagaactgccctgggcctgtataccggataatgactcagtgctggcaacatcagcctgaagacaggcccaactttgccatcattttggagaggattgaatactgcacccaggacccggatgtaatcaacaccgctttgccgatagaatatggtccacttgtggaagaggaagagaaagtgcctgtgaggcccaaggaccctgagggggttcctcctctcctggtctctcaacaggcaaaacgggaggaggagcgcagcccagctgccccaccacctctgcctaccacctcctctggcaaggctgcaaagaaacccacagctgcagagatctctgttcgagtccctagagggccggccgtggaagggggacacgtgaatatggcattctctcagtccaaccctccttcggagttgcacaaggtccacggatccagaaacaagcccaccagcttgtggaacccaacgtacggctcctggtttacagagaaacccaccaaaaagaataatcctatagcaaagaaggagccacacgacaggggtaacctggggctggagggaagctgtactgtcccacctaacgttgcaactgggagacttccgggggcctcactgctcctagagccctcttcgctgactgccaatatgaaggaggtacctctgttcaggctacgtcacttcccttgtgggaatgtcaattacggctaccagcaacagggcttgcccttagaagccgctactgcccctggagctggtcattacgaggataccattctgaaaagcaagaatagcatgaaccagcctgggccctga

SEQ ID NO: 15 - DNA, 4755 bp, Homo sapiens
  source 1..4755: mol_type = unassigned DNA
atgtattctccgctctgtctcacccaggatgaatttcatcctttcatcgaagcacttctgccccacgtccgagcctttgcctacacatggttcaacctgcaggcccgaaaacgaaaatacttcaaaaaacatgaaaagcgtatgtcaaaagaagaagagagagccgtgaaggatgaattgctaagtgaaaaaccagaggtcaagcagaagtgggcatctcgacttctggcaaagttgcggaaagatatccgacccgaatatcgagaggattttgttcttacagttacagggaaaaaacctccatgttgtgttctttccaacccagaccagaaaggcaagatgcgaagaattgactgcctccgccaggcagataaagtctggaggttggaccttgttatggtgattttgtttaaaggtattccgctggaaagtactgatggcgagcgccttgtaaagtccccacaatgctctaatccagggctctgtgtccaaccccatcacataggggtttctgttaaggaactcgatttatatttggcatactttgtgcatgcagcaggtcatagctccttggaatcaccaacaaacatgccttctccttctcctgattattttacatggaatctcacctggataatgaaagactccttccctttcctgtctcatcgcagccgatatggtctggagtgcagctttgacttcccctgtgagctggagtattcccctccactgcatgacctcaggaaccagagctggtcctggcgccgcatcccctccgaggaggcctcccagatggacttgctggatgggcctggggcagagcgttctaaggagatgcccagaggctcctttctccttctcaacacctcagctgactccaagcacaccatcctgagtccgtggatgaggagcagcagtgagcactgcacactggccgtctcggtgcacaggcacctgcagccctctggaaggtacattgcccagctgctgccccacaacgaggctgcaagagagatcctcctgatgcccactccagggaagcatggttggacagtgctccagggaagaatcgggcgtccagacaacccatttcgagtggccctggaatacatctccagtggaaaccgcagcttgtctgcagtggacttctttgccctgaagaactgcagtgaaggaacatccccaggctccaagatggccctgcagagctccttcacttgttggaatgggacagtcctccagcttgggcaggcctgtgacttccaccaggactgtgcccagggagaagatgagagccagatgtgccggaaactgcctgtgggtttttactgcaactttgaagatggcttctgtggctggacccaaggcacactgtcaccccacactcctcaatggcaggtcaggaccctaaaggatgcccggttccaggaccaccaagaccatgctctattgctcagtaccactgatgtccccgcttctgaaagtgctacagtgaccagtgctacgtttcctgcaccgatcaagagctctccatgtgagctccgaatgtcctggctcattcgtggagtcttgaggggaaacgtgtccttggtgctagtggagaacaaaaccgggaaggagcaaggcaggatggtctggcatgtcgccgcctatgaaggcttgagcctgtggcagtggatggtgttgcctctcctcgatgtgtctgacaggttctggctgcagatggtcgcatggtggggacaaggatccagagccatcgtggcttttgacaatatctccatcagcctggactgctacctcaccattagcggagaggacaagatcctgcagaatacagcacccaaatcaagaaacctgtttgagagaaacccaaacaaggagctgaaacccggggaaaattcaccaagacagacccccatctttgaccctacagttcattggctgttcaccacatgtggggccagcgggccccatggccccacccaggcacagtgcaacaacgcctaccagaactccaacctgagcgtggaggtggggagcgagggccccctgaaaggcatccagatctggaaggtgccagccaccgacacctacagcatctcgggctacggagctgctggcgggaaaggcgggaagaacaccatgatgcggtcccacggcgtgtctgtgctgggcatcttcaacctggagaaggatgacatgctgtacatcctggttgggcagcagggagaggacgcctgccccagtacaaaccagttaatccagaaagtctgcattggagagaacaatgtgatagaagaagaaatccgtgtgaacagaagcgtgcatgagtgggcaggaggcggaggaggagggggtggagccacctacgtatttaagatgaaggatggagtgccggtgcccctgatcattgcagccggaggtggtggcagggcctacggggccaagacagacacgttccacccagagagactggagaataactcctcggttctagggctaaacggcaattccggagccgcaggtggtggaggtggctggaatgataacacttccttgctctgggccggaaaatctttgcaggagggtgccaccggaggacattcctgcccccaggccatgaagaagtgggggtgggagacaagagggggtttcggagggggtggaggggggtgctcctcaggtggaggaggcggaggatatataggcggcaatgcagcctcaaacaatgaccccgaaatggatggggaagatggggtttccttcatcagtccactgggcatcctgtacaccccagctttaaaagtgatggaaggccacggggaagtgaatattaagcattatctaaactgcagtcactgtgaggtagacgaatgtcacatggaccctgaaagccacaaggtcatctgcttctgtgaccacgggacggtgctggctgaggatggcgtctcctgcattgtgtcacccaccccggagccacacctgccactctcgctgatcctctctgtggtgacctctgccctcgtggccgccctggtcctggctttctccggcatcatgattgtgtaccgccggaagcaccaggagctgcaagccatgcagatggagctgcagagccctgagtacaagctgagcaagctccgcacctcgaccatcatgaccgactacaaccccaactactgctttgctggcaagacctcctccatcagtgacctgaaggaggtgccgcggaaaaacatcaccctcattcggggtctgggccatggcgcctttggggaggtgtatgaaggccaggtgtccggaatgcccaacgacccaagccccctgcaagtggctgtgaagacgctgcctgaagtgtgctctgaacaggacgaactggatttcctcatggaagccctgatcatcagcaaattcaaccaccagaacattgttcgctgcattggggtgagcctgcaatccctgccccggttcatcctgctggagctcatggcggggggagacctcaagtccttcctccgagagacccgccctcgcccgagccagccctcctccctggccatgctggaccttctgcacgtggctcgggacattgcctgtggctgtcagtatttggaggaaaaccacttcatccaccgagacattgctgccagaaactgcctcttgacctgtccaggccctggaagagtggccaagattggagacttcgggatggcccgagacatctacagggcgagctactatagaaagggaggctgtgccatgctgccagttaagtggatgcccccagaggccttcatggaaggaatattcacttctaaaacagacacatggtcctttggagtgctgctatgggaaatcttttctcttggatatatgccataccccagcaaaagcaaccaggaagttctggagtttgtcaccagtggaggccggatggacccacccaagaactgccctgggcctgtataccggataatgactcagtgctggcaacatcagcctgaagacaggcccaactttgccatcattttggagaggattgaatactgcacccaggacccggatgtaatcaacaccgctttgccgatagaatatggtccacttgtggaagaggaagagaaagtgcctgtgaggcccaaggaccctgagggggttcctcctctcctggtctctcaacaggcaaaacgggaggaggagcgcagcccagctgccccaccacctctgcctaccacctcctctggcaaggctgcaaagaaacccacagctgcagagatctctgttcgagtccctagagggccggccgtggaagggggacacgtgaatatggcattctctcagtccaaccctccttcggagttgcacaaggtccacggatccagaaacaagcccaccagcttgtggaacccaacgtacggctcctggtttacagagaaacccaccaaaaagaataatcctatagcaaagaaggagccacacgacaggggtaacctggggctggagggaagctgtactgtcccacctaacgttgcaactgggagacttccgggggcctcactgctcctagagccctcttcgctgactgccaatatgaaggaggtacctctgttcaggctacgtcacttcccttgtgggaatgtcaattacggctaccagcaacagggcttgcccttagaagccgctactgcccctggagctggtcattacgaggataccattctgaaaagcaagaatagcatgaaccagcctgggccctga

SEQ ID NO: 16 - DNA, 3420 bp, Homo sapiens
  source 1..3420: mol_type = unassigned DNA
atggaggaggagggtggcagcagcggcggcgccgcggggaccagcgcggacggcggcgacggaggagagcagctcctcactgtcaagcacgagctgcggactgaccatgctctattgctcagtaccactgatgtccccgcttctgaaagtgctacagtgaccagtgctacgtttcctgcaccgatcaagagctctccatgtgagctccgaatgtcctggctcattcgtggagtcttgaggggaaacgtgtccttggtgctagtggagaacaaaaccgggaaggagcaaggcaggatggtctggcatgtcgccgcctatgaaggcttgagcctgtggcagtggatggtgttgcctctcctcgatgtgtctgacaggttctggctgcagatggtcgcatggtggggacaaggatccagagccatcgtggcttttgacaatatctccatcagcctggactgctacctcaccattagcggagaggacaagatcctgcagaatacagcacccaaatcaagaaacctgtttgagagaaacccaaacaaggagctgaaacccggggaaaattcaccaagacagacccccatctttgaccctacagttcattggctgttcaccacatgtggggccagcgggccccatggccccacccaggcacagtgcaacaacgcctaccagaactccaacctgagcgtggaggtggggagcgagggccccctgaaaggcatccagatctggaaggtgccagccaccgacacctacagcatctcgggctacggagctgctggcgggaaaggcgggaagaacaccatgatgcggtcccacggcgtgtctgtgctgggcatcttcaacctggagaaggatgacatgctgtacatcctggttgggcagcagggagaggacgcctgccccagtacaaaccagttaatccagaaagtctgcattggagagaacaatgtgatagaagaagaaatccgtgtgaacagaagcgtgcatgagtgggcaggaggcggaggaggagggggtggagccacctacgtatttaagatgaaggatggagtgccggtgcccctgatcattgcagccggaggtggtggcagggcctacggggccaagacagacacgttccacccagagagactggagaataactcctcggttctagggctaaacggcaattccggagccgcaggtggtggaggtggctggaatgataacacttccttgctctgggccggaaaatctttgcaggagggtgccaccggaggacattcctgcccccaggccatgaagaagtgggggtgggagacaagagggggtttcggagggggtggaggggggtgctcctcaggtggaggaggcggaggatatataggcggcaatgcagcctcaaacaatgaccccgaaatggatggggaagatggggtttccttcatcagtccactgggcatcctgtacaccccagctttaaaagtgatggaaggccacggggaagtgaatattaagcattatctaaactgcagtcactgtgaggtagacgaatgtcacatggaccctgaaagccacaaggtcatctgcttctgtgaccacgggacggtgctggctgaggatggcgtctcctgcattgtgtcacccaccccggagccacacctgccactctcgctgatcctctctgtggtgacctctgccctcgtggccgccctggtcctggctttctccggcatcatgattgtgtaccgccggaagcaccaggagctgcaagccatgcagatggagctgcagagccctgagtacaagctgagcaagctccgcacctcgaccatcatgaccgactacaaccccaactactgctttgctggcaagacctcctccatcagtgacctgaaggaggtgccgcggaaaaacatcaccctcattcggggtctgggccatggcgcctttggggaggtgtatgaaggccaggtgtccggaatgcccaacgacccaagccccctgcaagtggctgtgaagacgctgcctgaagtgtgctctgaacaggacgaactggatttcctcatggaagccctgatcatcagcaaattcaaccaccagaacattgttcgctgcattggggtgagcctgcaatccctgccccggttcatcctgctggagctcatggcggggggagacctcaagtccttcctccgagagacccgccctcgcccgagccagccctcctccctggccatgctggaccttctgcacgtggctcgggacattgcctgtggctgtcagtatttggaggaaaaccacttcatccaccgagacattgctgccagaaactgcctcttgacctgtccaggccctggaagagtggccaagattggagacttcgggatggcccgagacatctacagggcgagctactatagaaagggaggctgtgccatgctgccagttaagtggatgcccccagaggccttcatggaaggaatattcacttctaaaacagacacatggtcctttggagtgctgctatgggaaatcttttctcttggatatatgccataccccagcaaaagcaaccaggaagttctggagtttgtcaccagtggaggccggatggacccacccaagaactgccctgggcctgtataccggataatgactcagtgctggcaacatcagcctgaagacaggcccaactttgccatcattttggagaggattgaatactgcacccaggacccggatgtaatcaacaccgctttgccgatagaatatggtccacttgtggaagaggaagagaaagtgcctgtgaggcccaaggaccctgagggggttcctcctctcctggtctctcaacaggcaaaacgggaggaggagcgcagcccagctgccccaccacctctgcctaccacctcctctggcaaggctgcaaagaaacccacagctgcagagatctctgttcgagtccctagagggccggccgtggaagggggacacgtgaatatggcattctctcagtccaaccctccttcggagttgcacaaggtccacggatccagaaacaagcccaccagcttgtggaacccaacgtacggctcctggtttacagagaaacccaccaaaaagaataatcctatagcaaagaaggagccacacgacaggggtaacctggggctggagggaagctgtactgtcccacctaacgttgcaactgggagacttccgggggcctcactgctcctagagccctcttcgctgactgccaatatgaaggaggtacctctgttcaggctacgtcacttcccttgtgggaatgtcaattacggctaccagcaacagggcttgcccttagaagccgctactgcccctggagctggtcattacgaggataccattctgaaaagcaagaatagcatgaaccagcctgggccctga

SEQ ID NO: 17 - DNA, 4557 bp, Homo sapiens
  source 1..4557: mol_type = unassigned DNA
atggccctggtcctggagatcttcaccctgctggcctccatctgctgggtgtcggccaatatcttcgagtaccaggtggatgcccagccccttcgtccctgtgagctgcagagggaaacggcctttctgaagcaagcagactacgtgccccagtgtgcagaggatggcagcttccagactgtccagtgccagaacgacggccgctcctgctggtgtgtgggtgccaacggcagtgaagtgctgggcagcaggcagccaggacggcctgtggcttgtctgtcattttgtcagctacagaaacagcagatcttactgagtggctacattaacagcacagacacctcctacctccctcagtgtcaggattcaggggactacgcgcctgttcagtgtgatgtgcagcaggtccagtgctggtgtgtggacgcagaggggatggaggtgtatgggacccgccagctggggaggccaaagcgatgtccaaggagctgtgaaataagaaatcgtcgtcttctccacggggtgggagataagtcaccaccccagtgttctgcggagggagagtttatgcctgtccagtgcaaatttgtcaacaccacagacatgatgatttttgatctggtccacagctacaacaggtttccagatgcatttgtgaccttcagttccttccagaggaggttccctgaggtatctgggtattgccactgtgctgacagccaagggcgggaactggctgagacaggtttggagttgttactggatgaaatttatgacaccatttttgctggcctggaccttccttccaccttcactgaaaccaccctgtaccggatactgcagagacggttcctcgcagttcaatcagtcatctctggcagattccgatgccccacaaaatgtgaagtggagcggtttacagcaaccagctttggtcacccctatgttccaagctgccgccgaaatggcgactatcaggcggtgcagtgccagacggaagggccctgctggtgtgtggacgcccaggggaaggaaatgcatggaacccggcagcaaggggagccgccatcttgtgctgaaggccaatcttgtgcctccgaaaggcagcaggccttgtccagactctactttgggacctcaggctacttcagccagcacgacctgttctcttccccagagaaaagatgggcctctccaagagtagccagatttgccacatcctgcccacccacgatcaaggagctctttgtggactctgggcttctccgcccaatggtggagggacagagccaacagttttctgtctcagaaaatcttctcaaagaagccatccgagcaatttttccctcccgagggctggctcgtcttgcccttcagtttaccaccaacccaaagagactccagcaaaacctttttggagggaaatttttggtgaatgttggccagtttaacttgtctggagcccttggcacaagaggcacatttaacttcagtcaatttttccagcaacttggtcttgcaagcttcttgaatggagggagacaagaagatttggccaagccactctctgtgggattagattcaaattcttccacaggaacccctgaagctgctaagaaggatggtactatgaataagccaactgtgggcagctttggctttgaaattaacctacaagagaaccaaaatgccctcaaattccttgcttctctcctggagcttccagaattccttctcttcttgcaacatgctatctctgtgccagaagatgtggcaagagatttaggtgatgtgatggaaacggtactcagctcccagacctgtgagcagacacctgaaaggctatttgtcccatcatgcacgacagaaggaagctatgaggatgtccaatgcttttccggagagtgctggtgtgtgaattcctggggcaaagagcttccaggctcaagagtcagaggtggacagccaaggtgccccacagactgtgaaaagcaaagggctcgcatgcaaagcctcatgggcagccagcctgctggctccaccttgtttgtccctgcttgtactagtgagggacatttcctgcctgtccagtgcttcaactcagagtgctactgtgttgatgctgagggtcaggccattcctggaactcgaagtgcaatagggaagcccaagaaatgccccacgccctgtcaattacagtctgagcaagctttcctcaggacggtgcaggccctgctctctaactccagcatgctacccaccctttccgacacctacatcccacagtgcagcaccgatgggcagtggagacaagtgcaatgcaatgggcctcctgagcaggtcttcgagttgtaccaacgatgggaggctcagaacaagggccaggatctgacgcctgccaagctgctagtgaagatcatgagctacagagaagcagcttccggaaacttcagtctctttattcaaagtctgtatgaggctggccagcaagatgtcttcccggtgctgtcacaatacccttctctgcaagatgtcccactagcagcactggaagggaaacggccccagcccagggagaatatcctcctggagccctacctcttctggcagatcttaaatggccaactcagccaatacccggggtcctactcagacttcagcactcctttggcacattttgatcttcggaactgctggtgtgtggatgaggctggccaagaactggaaggaatgcggtctgagccaagcaagctcccaacattgtcacccaccccggagccacacctgccactctcgctgatcctctctgtggtgacctctgccctcgtggccgccctggtcctggctttctccggcatcatgattgtgtaccgccggaagcaccaggagctgcaagccatgcagatggagctgcagagccctgagtacaagctgagcaagctccgcacctcgaccatcatgaccgactacaaccccaactactgctttgctggcaagacctcctccatcagtgacctgaaggaggtgccgcggaaaaacatcaccctcattcggggtctgggccatggcgcctttggggaggtgtatgaaggccaggtgtccggaatgcccaacgacccaagccccctgcaagtggctgtgaagacgctgcctgaagtgtgctctgaacaggacgaactggatttcctcatggaagccctgatcatcagcaaattcaaccaccagaacattgttcgctgcattggggtgagcctgcaatccctgccccggttcatcctgctggagctcatggcggggggagacctcaagtccttcctccgagagacccgccctcgcccgagccagccctcctccctggccatgctggaccttctgcacgtggctcgggacattgcctgtggctgtcagtatttggaggaaaaccacttcatccaccgagacattgctgccagaaactgcctcttgacctgtccaggccctggaagagtggccaagattggagacttcgggatggcccgagacatctacagggcgagctactatagaaagggaggctgtgccatgctgccagttaagtggatgcccccagaggccttcatggaaggaatattcacttctaaaacagacacatggtcctttggagtgctgctatgggaaatcttttctcttggatatatgccataccccagcaaaagcaaccaggaagttctggagtttgtcaccagtggaggccggatggacccacccaagaactgccctgggcctgtataccggataatgactcagtgctggcaacatcagcctgaagacaggcccaactttgccatcattttggagaggattgaatactgcacccaggacccggatgtaatcaacaccgctttgccgatagaatatggtccacttgtggaagaggaagagaaagtgcctgtgaggcccaaggaccctgagggggttcctcctctcctggtctctcaacaggcaaaacgggaggaggagcgcagcccagctgccccaccacctctgcctaccacctcctctggcaaggctgcaaagaaacccacagctgcagagatctctgttcgagtccctagagggccggccgtggaagggggacacgtgaatatggcattctctcagtccaaccctccttcggagttgcacaaggtccacggatccagaaacaagcccaccagcttgtggaacccaacgtacggctcctggtttacagagaaacccaccaaaaagaataatcctatagcaaagaaggagccacacgacaggggtaacctggggctggagggaagctgtactgtcccacctaacgttgcaactgggagacttccgggggcctcactgctcctagagccctcttcgctgactgccaatatgaaggaggtacctctgttcaggctacgtcacttcccttgtgggaatgtcaattacggctaccagcaacagggcttgcccttagaagccgctactgcccctggagctggtcattacgaggataccattctgaaaagcaagaatagcatgaaccagcctgggccctga

SEQ ID NO: 18 - DNA, 3561 bp, Homo sapiens
  source 1..3561: mol_type = unassigned DNA
atggggactcctgcttctggaaggaaaagaacacctgtgaaagaccgattttctgcagaagatgaagctttgagtaacattgccagagaggcagaggcaaggctggcagcaaaacgggctgcccgggcagaagcaagagatatacgcatgagagaactggaacgacaacaaaaagagtactctcttcattcctttgatcggaagtggggacagattcagaagtggctggaagattcggaaagggccaggtattcccaccggtccagtcaccatcgtccttatctgggagttgaggatgcattgtccattcgaagtgttggcagtcacaggtatgatatgttcaaggatagatcatcaagactttcatcattaaatcattcttacagtcactctcatggaatgaagaagaggtcttctgattctcataaagacctactgagtggcctctactttgaccagagaaactatagcagtcttagacatagcaaacccacctctgcctactacactcggcagtcttcttccctgtacagtgaccctctggcaacatataagagtgacagggcctctcctactgcaaattctggtctgctgagaagtgccagtctggcatcattgtacaatggtggattatataacccttatggtcctcgaactccatctgaatgcagttattattcatcaagaataagttcagcccgaagcagtccagggtttaccaacgatgacactgcaagcattgtgtcttctgatcgtgccagtcgtggacgaagggagagtgtggtatctgccgctgattatttcagtcgctccaatcgtaggggaagtgttgtctctgaggtggatgatatcagtatcccagatttgtccagcttggatgaaaaatctgacaaacagtatgctgaaaattatacaagaccttcatctcgaaattctgcctcagcaacaacccctctaagtggaaactcatccagacgaggaagtggggacaccagcagcttaatagatccagacacttcattaagtgaattgcgggatatctatgaccttaaggaccagatacaggatgtagaagggagatacatgcaggggcttaaagaactaaaggaatctttgtctgaagtggaagaaaaatacaagaaagccatggtttccaatgcacagttagacaatgagaagaacaatttgatctaccaagtagacacactcaaggatgttattgaagagcaggaggaacagatggcagaattttatagagaaaatgaagaaaaatcaaaggagttagaaaggcagaaacatatgtgtagtgtgctgcagcataagatggaagaacttaaagaaggcctgcggcaaagagatgagcttattgaggagaagcagcgcatgcagcagaaaatagacaccatgacaaaagaggtgtttgacctccaggagacacttctttggaaagataaaaaaattggggccctagagaaacagaaagaatacattgcctgccttaggaatgagcgagatatgctcagagaggagctggctgacctgcaggagacagtgaagacgggagagaaacatggcttagttataatccccgatggcactcccaatggtgatgtcagtcatgaaccagtggctggagccatcactgttgtgtctcaggaagctgctcaggtcttggagtcagcaggagaagggccattagatgtaaggctacgaaaacttgctggagagaaggaagaactactgtcacagattagaaaactgaagcttcagttagaggaggaacgacagaaatgctccaggaatgatggcacagtgggtgacctggcaggactgcagaatggctcagacttgcagttcatcgaaatgcagatgtaccgccggaagcaccaggagctgcaagccatgcagatggagctgcagagccctgagtacaagctgagcaagctccgcacctcgaccatcatgaccgactacaaccccaactactgctttgctggcaagacctcctccatcagtgacctgaaggaggtgccgcggaaaaacatcaccctcattcggggtctgggccatggcgcctttggggaggtgtatgaaggccaggtgtccggaatgcccaacgacccaagccccctgcaagtggctgtgaagacgctgcctgaagtgtgctctgaacaggacgaactggatttcctcatggaagccctgatcatcagcaaattcaaccaccagaacattgttcgctgcattggggtgagcctgcaatccctgccccggttcatcctgctggagctcatggcggggggagacctcaagtccttcctccgagagacccgccctcgcccgagccagccctcctccctggccatgctggaccttctgcacgtggctcgggacattgcctgtggctgtcagtatttggaggaaaaccacttcatccaccgagacattgctgccagaaactgcctcttgacctgtccaggccctggaagagtggccaagattggagacttcgggatggcccgagacatctacagggcgagctactatagaaagggaggctgtgccatgctgccagttaagtggatgcccccagaggccttcatggaaggaatattcacttctaaaacagacacatggtcctttggagtgctgctatgggaaatcttttctcttggatatatgccataccccagcaaaagcaaccaggaagttctggagtttgtcaccagtggaggccggatggacccacccaagaactgccctgggcctgtataccggataatgactcagtgctggcaacatcagcctgaagacaggcccaactttgccatcattttggagaggattgaatactgcacccaggacccggatgtaatcaacaccgctttgccgatagaatatggtccacttgtggaagaggaagagaaagtgcctgtgaggcccaaggaccctgagggggttcctcctctcctggtctctcaacaggcaaaacgggaggaggagcgcagcccagctgccccaccacctctgcctaccacctcctctggcaaggctgcaaagaaacccacagctgcagagatctctgttcgagtccctagagggccggccgtggaagggggacacgtgaatatggcattctctcagtccaaccctccttcggagttgcacaaggtccacggatccagaaacaagcccaccagcttgtggaacccaacgtacggctcctggtttacagagaaacccaccaaaaagaataatcctatagcaaagaaggagccacacgacaggggtaacctggggctggagggaagctgtactgtcccacctaacgttgcaactgggagacttccgggggcctcactgctcctagagccctcttcgctgactgccaatatgaaggaggtacctctgttcaggctacgtcacttcccttgtgggaatgtcaattacggctaccagcaacagggcttgcccttagaagccgctactgcccctggagctggtcattacgaggataccattctgaaaagcaagaatagcatgaaccagcctgggccctga

SEQ ID NO: 19 - DNA, 5412 bp, Homo sapiens; identical to SEQ ID NO: 4
  source 1..5412: mol_type = unassigned DNA

SEQ ID NO: 20 - DNA, 2622 bp, Homo sapiens
  source 1..2622: mol_type = unassigned DNA
atgaactaccagcagcagctggccaactcggctgccatccgggccgagatccagcgcttcgagtcggtccaccccaacatctactccatctacgagctgctggagcgcgtggaggagccggtgctgcagaaccagatccgggagcacgtcatcgccatcgaagatgccttcgtgaacagccaggaatggacgctgagtcgatctgtcccggagctcaaagtgggaattgtgggtaacttggccagcggcaagtctgccctggtgcaccggtacctgacgggcacatatgtccaggaggagtctccggaaggtggcaggttcaagaaagagattgtcgttgatggacagagctatctgctgctgatcagagatgaagggggccccccggaggcgcagtttgccatgtgggtggacgctgttatatttgtcttcagcttggaggatgaaataagtttccagaccgtttaccactactacagtcgaatggccaactatcggaacacgagcgagattcctctggttctggtgggaacccaggatgccataagttctgctaacccgagggtcatcgatgacgccagggcgaggaagctctccaacgacctgaaacggtgcacgtactacgagacgtgtgctacatacgggctgaatgtggagagggtcttccaggacgtgatggaaggccacggggaagtgaatattaagcattatctaaactgcagtcactgtgaggtagacgaatgtcacatggaccctgaaagccacaaggtcatctgcttctgtgaccacgggacggtgctggctgaggatggcgtctcctgcattgtgtcacccaccccggagccacacctgccactctcgctgatcctctctgtggtgacctctgccctcgtggccgccctggtcctggctttctccggcatcatgattgtgtaccgccggaagcaccaggagctgcaagccatgcagatggagctgcagagccctgagtacaagctgagcaagctccgcacctcgaccatcatgaccgactacaaccccaactactgctttgctggcaagacctcctccatcagtgacctgaaggaggtgccgcggaaaaacatcaccctcattcggggtctgggccatggcgcctttggggaggtgtatgaaggccaggtgtccggaatgcccaacgacccaagccccctgcaagtggctgtgaagacgctgcctgaagtgtgctctgaacaggacgaactggatttcctcatggaagccctgatcatcagcaaattcaaccaccagaacattgttcgctgcattggggtgagcctgcaatccctgccccggttcatcctgctggagctcatggcggggggagacctcaagtccttcctccgagagacccgccctcgcccgagccagccctcctccctggccatgctggaccttctgcacgtggctcgggacattgcctgtggctgtcagtatttggaggaaaaccacttcatccaccgagacattgctgccagaaactgcctcttgacctgtccaggccctggaagagtggccaagattggagacttcgggatggcccgagacatctacagggcgagctactatagaaagggaggctgtgccatgctgccagttaagtggatgcccccagaggccttcatggaaggaatattcacttctaaaacagacacatggtcctttggagtgctgctatgggaaatcttttctcttggatatatgccataccccagcaaaagcaaccaggaagttctggagtttgtcaccagtggaggccggatggacccacccaagaactgccctgggcctgtataccggataatgactcagtgctggcaacatcagcctgaagacaggcccaactttgccatcattttggagaggattgaatactgcacccaggacccggatgtaatcaacaccgctttgccgatagaatatggtccacttgtggaagaggaagagaaagtgcctgtgaggcccaaggaccctgagggggttcctcctctcctggtctctcaacaggcaaaacgggaggaggagcgcagcccagctgccccaccacctctgcctaccacctcctctggcaaggctgcaaagaaacccacagctgcagagatctctgttcgagtccctagagggccggccgtggaagggggacacgtgaatatggcattctctcagtccaaccctccttcggagttgcacaaggtccacggatccagaaacaagcccaccagcttgtggaacccaacgtacggctcctggtttacagagaaacccaccaaaaagaataatcctatagcaaagaaggagccacacgacaggggtaacctggggctggagggaagctgtactgtcccacctaacgttgcaactgggagacttccgggggcctcactgctcctagagccctcttcgctgactgccaatatgaaggaggtacctctgttcaggctacgtcacttcccttgtgggaatgtcaattacggctaccagcaacagggcttgcccttagaagccgctactgcccctggagctggtcattacgaggataccattctgaaaagcaagaatagcatgaaccagcctgggccctga

SEQ ID NO: 21 - DNA, 6675 bp, Homo sapiens
  source 1..6675: mol_type = unassigned DNA
atgggagccatcgggctcctgtggctcctgccgctgctgctttccacggcagctgtgggctccgggatggggaccggccagcgcgcgggctccccagctgcggggccgccgctgcagccccgggagccactcagctactcgcgcctgcagaggaagagtctggcagttgacttcgtggtgccctcgctcttccgtgtctacgcccgggacctactgctgccaccatcctcctcggagctgaaggctggcaggcccgaggcccgcggctcgctagctctggactgcgccccgctgctcaggttgctggggccggcgccgggggtctcctggaccgccggttcaccagccccggcagaggcccggacgctgtccagggtgctgaagggcggctccgtgcgcaagctccggcgtgccaagcagttggtgctggagctgggcgaggaggcgatcttggagggttgcgtcgggccccccggggaggcggctgtggggctgctccagttcaatctcagcgagctgttcagttggtggattcgccaaggcgaagggcgactgaggatccgcctgatgcccgagaagaaggcgtcggaagtgggcagagagggaaggctgtccgcggcaattcgcgcctcccagccccgccttctcttccagatcttcgggactgtactggtaagtccttatggcttaaatgggacgctaacaggccaagcatacaagatgtcagacccagccactcgtaagttgattgaggaatggcagtatttctacccgatggtgctaaaaaagaaagaagaatcgaaagaggaagacgagttgggatatgatgatgatttccctgtggcagttgaagtaattgttggtggtgttcggatggtttacccttcagcatttgttttgatctctcagaatgacatcccggttcctcagagtgttgccagtgctggaggccacattgcagttgggcagcaagggcttggtagtgtgaaggacccaagtaactgtgggatgcctctgacccctcccacctctccagaacaggctatcctaggtgagagtggaggtatgcagagtgctgccagtcacctggtttcccaagatggagggatgataacgatgcacagtccaaagagatcggggaagattcctccaaaactccacaatcatatggtccatcgagtctggaaggaatgcatcctcaacagaacccagtccaagaggagccaaatgtcaactccaactcttgaagaagagcctgctagcaatcctgctacttgggattttgtggatccaacccaaagagtcagctgttcttgttccaggcataagcttttaaaacgttgtgcagtcgggcccaatcgacctcccacagtatctcaaccagggttcagtgcaggaccatcatcatcttcatctttaccacctcctgcttcttctaagcacaaaacagcagaaagacaggaaaaaggagacaagctgcaaaagagacccttaataccatttcaccataggccctctgtggccgaagaattatgcatggagcaagatacaccaggacagaaactagggttggcagggatagactcctccttagaggtgtctagcagtaggaaatatgataagcaaatggccgtgccttccagaaatacaagcaagcaaatgaatctgaatcctatggattcacctcattcccctatatcccctctgccaccaacactcagccctcagccacgaggtcaggaaacagagagtttggacccaccatcggtccctgtgaatccagccctttatggaaatggactagaactccagcagttgtctactctggatgacagaactgtcctcgtaggccaaagactgcctctcatggcagaggtcagcgagacagccttatattgtgggattaggccctcgaacccggagtcatcagaaaagtggtggcatagttatcgtctcccacccagtgatgatgctgagttcaggcctccagagctccagggtgagagatgtgatgccaaaatggaggtaaactcagagagcactgcattgcaaagactcttagcacaacctaacaaacggtttaaaatctggcaagacaaacagccccagttgcagccactccacttccttgacccattgcctctatcacaacaacctggagacagtttgggagaagtgaatgacccatatacctttgaagatggtgacataaaatacatctttacagccaacaagaaatgcaaacaagggacggagaaagattccctgaaaaagaataagtcagaggatggatttggtaccaaggatgtcactacaccaggtcattccacgccggtgcctgatgggaaaaatgccatgtctattttcagttctgctactaaaacagatgtccggcaggataatgctgctggcagagctggctccagtagccttacacaggtaacagatttggcaccttccctgcatgacttagacaacatctttgataattctgatgacgacgaacttggggctgtatcacctgctctgcgctcatcaaaaatgcctgcagttgggacagaagaccgacctcttgggaaggatggaagagctgctgttccttatccaccaacagttgcagacttgcaaaggatgtttcccactccaccatctttggaacagcatcctgcattttctcctgtgatgaattataaagatgggatcagctcagagacagtgacagcattaggcatgatggagagccctatggtcagtatggtttcaacacaactcacagaattcaaaatggaagtggaagatggattaggaagtcccaagcccgaggaaattaaggacttttcatatgtgcacaaagttccatcctttcaaccttttgtgggatcctccatgtttgctccactgaagatgttgccgagccattgtttgctacctctgaagatacctgatgcctgtctgtttcggccttcatgggcaattcctcctaaaattgaacaactgcccatgccccctgcagccactttcattagagatggctacaataacgtgcctagtgttgggagcctagcagatccagactatctgaacacaccacagatgaacacacccgtgacgttgaacagcgctgccccagccagcaatagtggggcaggagtcctaccatctccagcaacccctcgcttctctgtccccacaccacgaacccccaggaccccaagaactcccagaggtgggggcactgccagtggtcaagggtctgttaagtatgatagcaccgatcaaggatcaccagcctccaccccctctactacacggcccctcaactctgtggagcccgccaccatgcagccaattcccgaagcccacagcctctatgttaccctgattctctccgattccgtgatgaatatctttaaagacagaaactttgacagctgttgcatctgtgcctgcaacatgaacatcaaaggggcggatgtcgggctttacatccccgattcttccaatgaggaccagtaccgctgtacctgtgggtttagtgcgattatgaaccgcaaacttggctacaattcaggactcttccttgaagatgagttggatatttttgggaagaattctgatattggtcaggctgcagagaggcgcttaatgatgtgtcagtccaccttccttcctcaggtggaaggaaccaaaaaaccccaggagccacccataagccttctcctcctcctccagaatcaacacacacaaccttttgcttcactgaatttcctggactacatttcctctaacaatcgccaaactcttccctgtgtaagctggagttatgaccgggtgcaagcagataataatgattactggacggaatgctttaatgcgttggagcaggggcggcagtatgtggataaccccactggtggaaaagtggacgaagctctggtgagaagtgccactgtgcactcttggcctcacagcaatgtgctggacatcagcatgctctcctcccaggatgtggttcgtatgctgttgtccctgcagccctttctccaagatgccatccaaaagaagcgcacgggcaggacctgggagaacatccagcatgtgcagggaccactcacttggcagcagttccataaaatggcaggacggggaacctacggttcggaagaatctcctgagccgttgcccatccccactctgctggtaggctatgacaaggatttcctcaccatctcgccattctccttgccgttttgggagaggctcttgttggacccatatgggggccaccgtgatgttgcctatattgtggtgtgtccagaaaatgaggccttgctcgaaggagccaaaactttcttcagggacttgagtgctgtatacgagatgtgtaggcttgggcagcacaagcccatctgcaaagtgctacgtgacgggatcatgcgcgtgggaaaaactgtggcacagaagctgacagatgagcttgtgagtgagtggtttaaccagccttggagcggcgaggagaatgacaatcattccagactcaaactttatgcgcaagtttgccgccatcacctagcaccttatttagccactctgcagcttgatagcagcctattgataccacctaaataccagaccccaccagcagcagcacagggacaagctacgccagggaatgctgggcccttagctccaaatggatcagcagctcccccagctggcagtgcatttaatcccacctcgaatagtagttctacaaatcctgcagcaagtagttctgcatctggttcctctgtgccaccggtctcatcgtctgcctctgctcctggtattagccagataagcactacctcttcttcaggattcagtggtagtgttggagggcagaaccccagcactgggggcatttctgcggatagaacgcaagggaacataggctgtggtggagacactgaccctgggcagagctcttctcagccctcacaggatggacaagagagtgttacagaaagggagagaataggaattcccacggagcctgactctgcagacagccatgcccaccctccagctgttgtcatttacatggtggacccgttcacgtatgctgcagaggaggactccacttctgggaacttttggctgttgagcttgatgcgctgctacacagaaatgctggataatttacctgagcatatgagaaattctttcattctccagattgtgccttgccagtacatgctgcagacaatgaaggatgagcaagttttctacattcaatacttgaagtccatggcattttcagtgtactgccagtgcaggcgaccactgcctacacagatccacattaaatccctcacgggatttgggcctgcagccagcattgagatgaccctcaagaaccctgagcggcccagcccaatccagctttactcccctccctttatattggccccaatcaaagacaagcagacagagctgggagagacgtttggtgaggcgagccagaaatacaatgtgctcttcgtgggctattgtctgtctcacgaccagcgctggcttttggcttcctgcactgacctccatggggaattattagagacctgcgttgtaaatattgctttaccaaacaggtcacggaggagtaaagtatctgcacgtaaaattggactacagaagttatgggagtggtgcatagggattgtccaaatgacatctctaccctggagagttgtaatcgggcgacttgggcgtcttggccatggggagcttaaagattggagtatcctccttggagaatgttcactacagacaatcagcaaaaagctcaaggatgtgtgccggatgtgtggaatctctgccgcagactctccttctatccttagtgcctgcctggttgccatggagccccaggggtcctttgtagtgatgccagatgctgtcacaatgggctctgtttttggccgaagtactgcactgaacatgcagtcatctcagctcaacacccctcaagatgcttcttgtacacacatcttggtgttcccaacatcatcaaccatccaggtggctccagccaactaccccaatgaagatgggtttagccccaacaatgatgatatgtttgttgaccttccattcccagatgatatggacaatgatattggcatattaatgactgggaacctccattcctctcccaactcttccccagtaccctccccaggctctccttctggaattggtgtgggctctcacttccagcatagtcggagccagggtgagcgtcttctttctagagaagcaccagaggagctaaagcagcagcccctggcccttgggtattttgtatcaactgccaaagctgagaatcttccccagtggttttggtcatcgtgtccccaggctcaaaaccagtgccctctcttcttaaaggcttcgctgcatcaccacatttcagtagcacagacagacgaacttctgcctgccaggaattctcagcgggttccacaccctcttgactccaaaaccacgtcggatgttttaaggtttgttttggagcagtacaacgctctgtcctggctcacgtgcaatccggccacccaggaccgtacttcctgccttcccgtccactttgtggtgctcactcagttgtacaatgccatcatgaatatactttaa

SEQ ID NO: 22 - DNA, 4464 bp, Homo sapiens
  source 1..4464: mol_type = unassigned DNA
atgggagccatcgggctcctgtggctcctgccgctgctgctttccacggcagctgtgggctccgggatggggaccggccagcgcgcgggctccccagctgcggggccgccgctgcagccccgggagccactcagctactcgcgcctgcagaggaagagtctggcagttgacttcgtggtgccctcgctcttccgtgtctacgcccgggacctactgctgccaccatcctcctcggagctgaaggctggcaggcccgaggcccgcggctcgctagctctggactgcgccccgctgctcaggttgctggggccggcgccgggggtctcctggaccgccggttcaccagccccggcagaggcccggacgctgtccagggtgctgaagggcggctccgtgcgcaagctccggcgtgccaagcagttggtgctggagctgggcgaggaggcgatcttggagggttgcgtcgggccccccggggaggcggctgtggggctgctccagttcaatctcagcgagctgttcagttggtggattcgccaaggcgaagggcgactgaggatccgcctgatgcccgagaagaaggcgtcggaagtgggcagagagggaaggctgtccgcggcaattcgcgcctcccagccccgccttctcttccagatcttcgggactggtcatagctccttggaatcaccaacaaacatgccttctccttctcctgattattttacatggaatctcacctggataatgaaagactccttccctttcctgtctcatcgcagccgatatggtctggagtgcagctttgacttcccctgtgagctggagtattcccctccactgcatgacctcaggaaccagagctggtcctggcgccgcatcccctccgaggaggcctcccagatggacttgctggatgggcctggggcagagcgttctaaggagatgcccagaggctcctttctccttctcaacacctcagctgactccaagcacaccatcctgagtccgtggatgaggagcagcagtgagcactgcacactggccgtctcggtgcacaggcacctgcagccctctggaaggtacattgcccagctgctgccccacaacgaggctgcaagagagatcctcctgatgcccactccagggaagcatggttggacagtgctccagggaagaatcgggcgtccagacaacccatttcgagtggccctggaatacatctccagtggaaaccgcagcttgtctgcagtggacttctttgccctgaagaactgcagtgaaggaacatccccaggctccaagatggccctgcagagctccttcacttgttggaatgggacagtcctccagcttgggcaggcctgtgacttccaccaggactgtgcccagggagaagatgagagccagatgtgccggaaactgcctgtgggtttttactgcaactttgaagatggcttctgtggctggacccaaggcacactgtcaccccacactcctcaatggcaggtcaggaccctaaaggatgcccggttccaggaccaccaagaccatgctctattgctcagtaccactgatgtccccgcttctgaaagtgctacagtgaccagtgctacgtttcctgcaccgatcaagagctctccatgtgagctccgaatgtcctggctcattcgtggagtcttgaggggaaacgtgtccttggtgctagtggagaacaaaaccgggaaggagcaaggcaggatggtctggcatgtcgccgcctatgaaggcttgagcctgtggcagtggatggtgttgcctctcctcgatgtgtctgacaggttctggctgcagatggtcgcatggtggggacaaggatccagagccatcgtggcttttgacaatatctccatcagcctggactgctacctcaccattagcggagaggacaagatcctgcagaatacagcacccaaatcaagaaacctgtttgagagaaacccaaacaaggagctgaaacccggggaaaattcaccaagacagacccccatctttgaccctacagttcattggctgttcaccacatgtggggccagcgggccccatggccccacccaggcacagtgcaacaacgcctaccagaactccaacctgagcgtggaggtggggagcgagggccccctgaaaggcatccagatctggaaggtgccagccaccgacacctacagcatctcgggctacggagctgctggcgggaaaggcgggaagaacaccatgatgcggtcccacggcgtgtctgtgctgggcatcttcaacctggagaaggatgacatgctgtacatcctggttgggcagcagggagaggacgcctgccccagtacaaaccagttaatccagaaagtctgcattggagagaacaatgtgatagaagaagaaatccgtgtgaacagaagcgtgcatgagtgggcaggaggcggaggaggagggggtggagccacctacgtatttaagatgaaggatggagtgccggtgcccctgatcattgcagccggaggtggtggcagggcctacggggccaagacagacacgttccacccagagagactggagaataactcctcggttctagggctaaacggcaattccggagccgcaggtggtggaggtggctggaatgataacacttccttgctctgggccggaaaatctttgcaggagggtgccaccggaggacattcctgcccccaggccatgaagaagtgggggtgggagacaagagggggtttcggagggggtggaggggggtgctcctcaggtggaggaggcggaggatatataggcggcaatgcagcctcaaacaatgaccccgaaatggatggggaagatggggtttccttcatcagtccactgggcatcctgtacaccccagctttaaaagttccagatgttgaagtgaaaggagagtgttctagctattatctcttgttacaaggtaatggcaatagaagatgtaaagccacattgattcactcagccaaccagatcaatggctcatttgcactcaatttaattcatggaaagatgaaaacaaagacagaagaagccaaattgagttttccttttgacttattatcacttccacatttttctggggagcagattgtacagagagagaaacagttagctaatgttcaagttttagctttggaagaatgcctaaaaagacgaaagttggcaaagcagcctgaaacagtttctgttgctgaactcaaaagtctgttagtactcacaaggaaacactttttagattattttgatgctgtgattcctaaaatgattctaagaaagatggacaaaattaaaaccttcaatatattaaatgattttagtccagtggaacctaattcctcaagtctaatggaaaccaatcctctggaatggccagaaaggcatgttcttcaaaatttggaaacttttgaaaaaactaaacaaaaaatgagaactggttcattacctcattcatctgaacagttgctgggccacaaagagggtcctcgggactcaatcacattgttggatgctaaagaattgctgaagtactttacctcagatggattacccattggagatcttcaacctttaccgattcaaaagggggaaaagacttttgttttgacaccagaacttagtcctgggaaacttcaggtcttaccttttgagaaagcctcagtatgtcattatcatggaattgaatattgcttggatgaccgaaaagctttggaaagagatggaggattttctgaacttcagtctcgtcttattcgttatgaaactcaaactacctgcaccagagaaagttttccagtacctactgtgttgagccctcttccatctcctgtagtttcgtcagatcctggaagtgtccctgacggagaagttttacaaaatgaacttcgaactgaagtatcccgattgaaacggagatctaaagatctgaattgcctttatcccagaaaaagacttgtgaaatctgaaagttcagagtctcttctttctcagacaactggtaatagtaatcactatcatcatcatgtgacatccagaaagccacaaacagaacggtccttaccagtgacttgtccattggttccaattcctagctgtgaaactccaaaacttgctacaaagaccagttcaggtcaaaaaagtatgcatgaatcaaaaacatcaaggcaaattaaggaatcaagatcacagaaacacacacggatactgaaagaagtagttactgaaaccctgaagaaacacagtattaccgagactcatgaatgtttcactgcatgcagccagcgtctctttgaaatctctaagttctatctaaaggatcttaaaacttcaaggggtctatttgaagaaatgaagaaaacagcaaacaacaatgctgtacaggtgattgactgggtattagaaaagacaagcaagaaatga

SEQ ID NO: 23 - skipped

SEQ ID NO: 24 - DNA, 4278 bp, Homo sapiens
  source 1..4278: mol_type = unassigned DNA
atgggagccatcgggctcctgtggctcctgccgctgctgctttccacggcagctgtgggctccgggatggggaccggccagcgcgcgggctccccagctgcggggccgccgctgcagccccgggagccactcagctactcgcgcctgcagaggaagagtctggcagttgacttcgtggtgccctcgctcttccgtgtctacgcccgggacctactgctgccaccatcctcctcggagctgaaggctggcaggcccgaggcccgcggctcgctagctctggactgcgccccgctgctcaggttgctggggccggcgccgggggtctcctggaccgccggttcaccagccccggcagaggcccggacgctgtccagggtgctgaagggcggctccgtgcgcaagctccggcgtgccaagcagttggtgctggagctgggcgaggaggcgatcttggagggttgcgtcgggccccccggggaggcggctgtggggctgctccagttcaatctcagcgagctgttcagttggtggattcgccaaggcgaagggcgactgaggatccgcctgatgcccgagaagaaggcgtcggaagtgggcagagagggaaggctgtccgcggcaattcgcgcctcccagccccgccttctcttccagatcttcgggactggtcatagctccttggaatcaccaacaaacatgccttctccttctcctgattattttacatggaatctcacctggataatgaaagactccttccctttcctgtctcatcgcagccgatatggtctggagtgcagctttgacttcccctgtgagctggagtattcccctccactgcatgacctcaggaaccagagctggtcctggcgccgcatcccctccgaggaggcctcccagatggacttgctggatgggcctggggcagagcgttctaaggagatgcccagaggctcctttctccttctcaacacctcagctgactccaagcacaccatcctgagtccgtggatgaggagcagcagtgagcactgcacactggccgtctcggtgcacaggcacctgcagccctctggaaggtacattgcccagctgctgccccacaacgaggctgcaagagagatcctcctgatgcccactccagggaagcatggttggacagtgctccagggaagaatcgggcgtccagacaacccatttcgagtggccctggaatacatctccagtggaaaccgcagcttgtctgcagtggacttctttgccctgaagaactgcagtgaaggaacatccccaggctccaagatggccctgcagagctccttcacttgttggaatgggacagtcctccagcttgggcaggcctgtgacttccaccaggactgtgcccagggagaagatgagagccagatgtgccggaaactgcctgtgggtttttactgcaactttgaagatggcttctgtggctggacccaaggcacactgtcaccccacactcctcaatggcaggtcaggaccctaaaggatgcccggttccaggaccaccaagaccatgctctattgctcagtaccactgatgtccccgcttctgaaagtgctacagtgaccagtgctacgtttcctgcaccgatcaagagctctccatgtgagctccgaatgtcctggctcattcgtggagtcttgaggggaaacgtgtccttggtgctagtggagaacaaaaccgggaaggagcaaggcaggatggtctggcatgtcgccgcctatgaaggcttgagcctgtggcagtggatggtgttgcctctcctcgatgtgtctgacaggttctggctgcagatggtcgcatggtggggacaaggatccagagccatcgtggcttttgacaatatctccatcagcctggactgctacctcaccattagcggagaggacaagatcctgcagaatacagcacccaaatcaagaaacctgtttgagagaaacccaaacaaggagctgaaacccggggaaaattcaccaagacagacccccatctttgaccctacagttcattggctgttcaccacatgtggggccagcgggccccatggccccacccaggcacagtgcaacaacgcctaccagaactccaacctgagcgtggaggtggggagcgagggccccctgaaaggcatccagatctggaaggtgccagccaccgacacctacagcatctcgggctacggagctgctggcgggaaaggcgggaagaacaccatgatgcggtcccacggcgtgtctgtgctgggcatcttcaacctggagaaggatgacatgctgtacatcctggttgggcagcagggagaggacgcctgccccagtacaaaccagttaatccagaaagtctgcattggagagaacaatgtgatagaagaagaaatccgtgtgaacagaagcgtgcatgagtgggcaggaggcggaggaggagggggtggagccacctacgtatttaagatgaaggatggagtgccggtgcccctgatcattgcagccggaggtggtggcagggcctacggggccaagacagacacgttccacccagagagactggagaataactcctcggttctagggctaaacggcaattccggagccgcaggtggtggaggtggctggaatgataacacttccttgctctgggccggaaaatctttgcaggagggtgccaccggaggacattcctgcccccaggccatgaagaagtgggggtgggagacaagagggggtttcggagggggtggaggggggtgctcctcaggtggaggaggcggaggatatataggcggcaatgcagcctcaaacaatgaccccgaaatggatggggaagatggggtttccttcatcagtccactgggcatcctgtacaccccagctttaaaagtgatggaaggccacggggaagtgaatattaagcattatctaaactgcagtcactgtgaggtagacgaatgtcacatggaccctgaaagccacaaggtcatctgcttctgtgaccacgggacggtgctggctgaggatggcgtctcctgcattgctttaactgcctatacttacctgaccatttttgatctttttagtttaatgacatgtttaataagttactgggtaacattgaggaaacctagccctgtctattcatttgggtttgaaagattagaagtcctggctgtatttgcctccacagtcttggcacagttgggagctctctttatattaaaagaaagtgcagaacgctttttggaacagcccgagatacacacgggaagattattagttggtacttttgtggctctttgtttcaacctgttcacgatgctttctattcggaataaaccttttgcttatgtctcagaagctgctagtacgagctggcttcaagagcatgttgcagatcttagtcgaagcttgtgtggaattattccgggacttagcagtatcttccttccccgaatgaatccatttgttttgattgatcttgctggagcatttgctctttgtattacatatatgctcattgaaattaataattattttgccgtagacactgcctctgctatagctattgccttgatgacatttggcactatgtatcccatgagtgtgtacagtgggaaagtcttactccagacaacaccaccccatgttattggtcagttggacaaactcatcagagaggtatctaccttagatggagttttagaagtccgaaatgaacatttttggaccctaggttttggctcattggctggatcagtgcatgtaagaattcgacgagatgccaatgaacaaatggttcttgctcatgtgaccaacaggctgtacactctagtgtctactctaactgttcaaattttcaaggatgactggattaggcctgccttattgtctgggcctgttgcagccaatgtcctaaacttttcagatcatcacgtaatcccaatgcctcttttaaagggtactgatgatttgaacccagttacatcaactccagctaaacctagtagtccacctccagaattttcatttaacactcctgggaaaaatgtgaacccagttattcttctaaacacacaaacaaggccttatggttttggtctcaatcatggacacacaccttacagcagcatgcttaatcaaggacttggagttccaggaattggagcaactcaaggattgaggactggttttacaaatataccaagtagatatggaactaataatagaattggacaaccaagaccatga

SEQ ID NO: 25 - DNA, 4863 bp, Homo sapiens
  source 1..4863: mol_type = unassigned DNA
atgggagccatcgggctcctgtggctcctgccgctgctgctttccacggcagctgtgggctccgggatggggaccggccagcgcgcgggctccccagctgcggggccgccgctgcagccccgggagccactcagctactcgcgcctgcagaggaagagtctggcagttgacttcgtggtgccctcgctcttccgtgtctacgcccgggacctactgctgccaccatcctcctcggagctgaaggctggcaggcccgaggcccgcggctcgctagctctggactgcgccccgctgctcaggttgctggggccggcgccgggggtctcctggaccgccggttcaccagccccggcagaggcccggacgctgtccagggtgctgaagggcggctccgtgcgcaagctccggcgtgccaagcagttggtgctggagctgggcgaggaggcgatcttggagggttgcgtcgggccccccggggaggcggctgtggggctgctccagttcaatctcagcgagctgttcagttggtggattcgccaaggcgaagggcgactgaggatccgcctgatgcccgagaagaaggcgtcggaagtgggcagagagggaaggctgtccgcggcaattcgcgcctcccagccccgccttctcttccagatcttcgggactggtcatagctccttggaatcaccaacaaacatgccttctccttctcctgattattttacatggaatctcacctggataatgaaagactccttccctttcctgtctcatcgcagccgatatggtctggagtgcagctttgacttcccctgtgagctggagtattcccctccactgcatgacctcaggaaccagagctggtcctggcgccgcatcccctccgaggaggcctcccagatggacttgctggatgggcctggggcagagcgttctaaggagatgcccagaggctcctttctccttctcaacacctcagctgactccaagcacaccatcctgagtccgtggatgaggagcagcagtgagcactgcacactggccgtctcggtgcacaggcacctgcagccctctggaaggtacattgcccagctgctgccccacaacgaggctgcaagagagatcctcctgatgcccactccagggaagcatggttggacagtgctccagggaagaatcgggcgtccagacaacccatttcgagtggccctggaatacatctccagtggaaaccgcagcttgtctgcagtggacttctttgccctgaagaactgcagtgaaggaacatccccaggctccaagatggccctgcagagctccttcacttgttggaatgggacagtcctccagcttgggcaggcctgtgacttccaccaggactgtgcccagggagaagatgagagccagatgtgccggaaactgcctgtgggtttttactgcaactttgaagatggcttctgtggctggacccaaggcacactgtcaccccacactcctcaatggcaggtcaggaccctaaaggatgcccggttccaggaccaccaagaccatgctctattgctcagtaccactgatgtccccgcttctgaaagtgctacagtgaccagtgctacgtttcctgcaccgatcaagagctctccatgtgagctccgaatgtcctggctcattcgtggagtcttgaggggaaacgtgtccttggtgctagtggagaacaaaaccgggaaggagcaaggcaggatggtctggcatgtcgccgcctatgaaggcttgagcctgtggcagtggatggtgttgcctctcctcgatgtgtctgacaggttctggctgcagatggtcgcatggtggggacaaggatccagagccatcgtggcttttgacaatatctccatcagcctggactgctacctcaccattagcggagaggacaagatcctgcagaatacagcacccaaatcaagaaacctgtttgagagaaacccaaacaaggagctgaaacccggggaaaattcaccaagacagacccccatctttgaccctacagttcattggctgttcaccacatgtggggccagcgggccccatggccccacccaggcacagtgcaacaacgcctaccagaactccaacctgagcgtggaggtggggagcgagggccccctgaaaggcatccagatctggaaggtgccagccaccgacacctacagcatctcgggctacggagctgctggcgggaaaggcgggaagaacaccatgatgcggtcccacggcgtgtctgtgctgggcatcttcaacctggagaaggatgacatgctgtacatcctggttgggcagcagggagaggacgcctgccccagtacaaaccagttaatccagaaagtctgcattggagagaacaatgtgatagaagaagaaatccgtgtgaacagaagcgtgcatgagtgggcaggaggcggaggaggagggggtggagccacctacgtatttaagatgaaggatggagtgccggtgcccctgatcattgcagccggaggtggtggcagggcctacggggccaagacagacacgttccacccagagagactggagaataactcctcggttctagggctaaacggcaattccggagccgcaggtggtggaggtggctggaatgataacacttccttgctctgggccggaaaatctttgcaggagggtgccaccggaggacattcctgcccccaggccatgaagaagtgggggtgggagacaagagggggtttcggagggggtggaggggggtgctcctcaggtggaggaggcggaggatatataggcggcaatgcagcctcaaacaatgaccccgaaatggatggggaagatggggtttccttcatcagtccactgggcatcctgtacaccccagctttaaaagtgatggaaggccacggggaagtgaatattaagcattatctaaactgcagtcactgtgaggtagacgaatgtcacatggaccctgaaagccacaaggtcatctgcttctgtgaccacgggacggtgctggctgaggatggcgtctcctgcattgtgtcacccaccccggagccacacctgccactctcgctgatcctctctgtggtgacctctgccctcgtggccgccctggtcctggctttctccggcatcatgattgtgtaccgccggaagcaccaggagctgcaagccatgcagatggagctgcagagccctgagtacaagctgagcaagctccgcacctcgaccatcatgaccgactacaaccccaactactgctttgctggcaagacctcctccatcagtgacctgaaggaggtgccgcggaaaaacatcaccctcattcggggtctgggccatggcgcctttggggaggtgtatgaaggccaggtgtccggaatgcccaacgacccaagccccctgcaagtggctgtgaagacgctgcctgaagtgtgctctgaacaggacgaactggatttcctcatggaagccctgatcatcagcaaattcaaccaccagaacattgttcgctgcattggggtgagcctgcaatccctgccccggttcatcctgctggagctcatggcggggggagacctcaagtccttcctccgagagacccgccctcgcccgagccagccctcctccctggccatgctggaccttctgcacgtggctcgggacattgcctgtggctgtcagtatttggaggaaaaccacttcatccaccgagacattgctgccagaaactgcctcttgacctgtccaggccctggaagagtggccaagattggagacttcgggatggcccgagacatctacagggcgagctactatagaaagggaggctgtgccatgctgccagttaagtggatgcccccagaggccttcatggaaggaatattcacttctaaaacagacacatggtcctttggagtgctgctatgggaaatcttttctcttggatatatgccataccccagcaaaagcaaccaggaagttctggagtttgtcaccagtggaggccggatggacccacccaagaactgccctgggcctgttataaatgtcatgaaacagctcattggttcatctaacttatttgtgatgcaagtggagatggatatatacactgctctaaaaaagtggatgttccttcaacttgtgccttcttggaatggatctttaaaacagcttttgacagaaacagatgtctggttttctaaacagaggaaagattttgaaggtatggcctttcttgaaactgaacaaggaaaaccatttgtgtcagtattcagacatttaaggttacaatatattatcagtgatctggcttctgcaagaattattgaacaagatgctgtagtaccttcagaatggctctcttctgtgtataaacagcagtggtttgctatgctgcgggcagaacaggacagtgaggtggggcctcaagaaatcaataaagaagaactagagggaaacagcatgaggtgtggtagaaagcttgccaaagatggtgaatactgctggcgttggacaggttttaacttcggcttcgacctacttgtaacttacaccaatcgatacatcattttcaaacgcaatacactgaatcagccatgtagcggatctgtcagtttacagcctcgaaggagcatagcatttagattacgtttggcttcttttgatagtagtggaaaactaatatgtagtagaacaactggctatcaaatacttacacttgaaaaggatcaggaacaagtggtgatgaacttggacagcaggcttctgatcttccctttatatatctgctgtaacttcttgtatatatcaccagaaaaaaagaattga

SEQ ID NO: 26 - DNA, 4914 bp, Homo sapiens
  source 1..4914: mol_type = unassigned DNA
atgggagccatcgggctcctgtggctcctgccgctgctgctttccacggcagctgtgggctccgggatggggaccggccagcgcgcgggctccccagctgcggggccgccgctgcagccccgggagccactcagctactcgcgcctgcagaggaagagtctggcagttgacttcgtggtgccctcgctcttccgtgtctacgcccgggacctactgctgccaccatcctcctcggagctgaaggctggcaggcccgaggcccgcggctcgctagctctggactgcgccccgctgctcaggttgctggggccggcgccgggggtctcctggaccgccggttcaccagccccggcagaggcccggacgctgtccagggtgctgaagggcggctccgtgcgcaagctccggcgtgccaagcagttggtgctggagctgggcgaggaggcgatcttggagggttgcgtcgggccccccggggaggcggctgtggggctgctccagttcaatctcagcgagctgttcagttggtggattcgccaaggcgaagggcgactgaggatccgcctgatgcccgagaagaaggcgtcggaagtgggcagagagggaaggctgtccgcggcaattcgcgcctcccagccccgccttctcttccagatcttcgggactggtcatagctccttggaatcaccaacaaacatgccttctccttctcctgattattttacatggaatctcacctggataatgaaagactccttccctttcctgtctcatcgcagccgatatggtctggagtgcagctttgacttcccctgtgagctggagtattcccctccactgcatgacctcaggaaccagagctggtcctggcgccgcatcccctccgaggaggcctcccagatggacttgctggatgggcctggggcagagcgttctaaggagatgcccagaggctcctttctccttctcaacacctcagctgactccaagcacaccatcctgagtccgtggatgaggagcagcagtgagcactgcacactggccgtctcggtgcacaggcacctgcagccctctggaaggtacattgcccagctgctgccccacaacgaggctgcaagagagatcctcctgatgcccactccagggaagcatggttggacagtgctccagggaagaatcgggcgtccagacaacccatttcgagtggccctggaatacatctccagtggaaaccgcagcttgtctgcagtggacttctttgccctgaagaactgcagtgaaggaacatccccaggctccaagatggccctgcagagctccttcacttgttggaatgggacagtcctccagcttgggcaggcctgtgacttccaccaggactgtgcccagggagaagatgagagccagatgtgccggaaactgcctgtgggtttttactgcaactttgaagatggcttctgtggctggacccaaggcacactgtcaccccacactcctcaatggcaggtcaggaccctaaaggatgcccggttccaggaccaccaagaccatgctctattgctcagtaccactgatgtccccgcttctgaaagtgctacagtgaccagtgctacgtttcctgcaccgatcaagagctctccatgtgagctccgaatgtcctggctcattcgtggagtcttgaggggaaacgtgtccttggtgctagtggagaacaaaaccgggaaggagcaaggcaggatggtctggcatgtcgccgcctatgaaggcttgagcctgtggcagtggatggtgttgcctctcctcgatgtgtctgacaggttctggctgcagatggtcgcatggtggggacaaggatccagagccatcgtggcttttgacaatatctccatcagcctggactgctacctcaccattagcggagaggacaagatcctgcagaatacagcacccaaatcaagaaacctgtttgagagaaacccaaacaaggagctgaaacccggggaaaattcaccaagacagacccccatctttgaccctacagttcattggctgttcaccacatgtggggccagcgggccccatggccccacccaggcacagtgcaacaacgcctaccagaactccaacctgagcgtggaggtggggagcgagggccccctgaaaggcatccagatctggaaggtgccagccaccgacacctacagcatctcgggctacggagctgctggcgggaaaggcgggaagaacaccatgatgcggtcccacggcgtgtctgtgctgggcatcttcaacctggagaaggatgacatgctgtacatcctggttgggcagcagggagaggacgcctgccccagtacaaaccagttaatccagaaagtctgcattggagagaacaatgtgatagaagaagaaatccgtgtgaacagaagcgtgcatgagtgggcaggaggcggaggaggagggggtggagccacctacgtatttaagatgaaggatggagtgccggtgcccctgatcattgcagccggaggtggtggcagggcctacggggccaagacagacacgttccacccagagagactggagaataactcctcggttctagggctaaacggcaattccggagccgcaggtggtggaggtggctggaatgataacacttccttgctctgggccggaaaatctttgcaggagggtgccaccggaggacattcctgcccccaggccatgaagaagtgggggtgggagacaagagggggtttcggagggggtggaggggggtgctcctcaggtggaggaggcggaggatatataggcggcaatgcagcctcaaacaatgaccccgaaatggatggggaagatggggtttccttcatcagtccactgggcatcctgtacaccccagctttaaaagtgatggaaggccacggggaagtgaatattaagcattatctaaactgcagtcactgtgaggtagacgaatgtcacatggaccctgaaagccacaaggtcatctgcttctgtgaccacgggacggtgctggctgaggatggcgtctcctgcattgtgtcacccaccccggagccacacctgccactctcgctgatcctctctgtggtgacctctgccctcgtggccgccctggtcctggctttctccggcatcatgattgttgcccagaagattgttgccacaaggaagaagcagcagctgtccataggaccctgcaagtcgctacctaattctcccagccattcctccgtctgttccgcgcaggtgtctgccgtgcacatcagccagacaagtaatggaggtgggagtttaagcgactattcctcctccgttccatcgactcccagcaccagccagaaggaacttcggatcgatgttcctcccactgccaacacgcccacgcccgttcgcaagcagtctaagcgccggtccaacctgttcacctctcggaaagggagcgacccagacaaagagaagaaaggcctggagagtcgtgcggacagcattgggagcggccgagccatcccaattaaacagggcatgctgttgaagcgaagtggcaaatcgttgaataaagagtggaaaaagaaatatgtcaccctgtgtgacaatggcgtgctgacctatcatcccagtttacatgattacatgcagaatgttcatggtaaggagattgaccttctgagaaccactgtgaaagtcccagggaagaggccaccccgagccacgtcagcctgcgcacccatctccagccctaaaaccaatggcctatccaaggacatgagcagtttacacatctcacccaattcagacacagggctgggtgactccgtatgctccagccccagtatctccagcaccaccagccccaagctcgacccgcccccctcccctcacgccaacagaaagaagcaccgaaggaagaaaagcactagcaacttcaaagccgacggcctgtccggcactgctgaagaacaagaagaaaattttgagtttatcattgtgtccctcactggccaaacatggcactttgaagccacgacgtatgaggagcgggacgcctgggtccaagccatcgagagccagatcctggccagcctgcagtcgtgcgagagcagcaagaacaagtcccggctgacgagccagagcgaggccatggccctgcagtcgatccggaacatgcgcgggaactcccactgtgtggactgcgagacccagaatcccaactgggccagtttgaacttgggagccctcatgtgcatcgaatgctcagggatccaccggaatcttggcacccacctttcccgagtccgatctctggacctggatgactggccagtcgagctcatcaaggtgatgtcatccatcgggaacgagctagccaacagcgtctgggaagagagcagccaggggcggacgaaaccatcggtagactccacaagggaagagaaggaacggtggatccgtgccaagtacgagcagaagctcttcctggccccgctgccctgcacggagctgtccctgggccagcacctgctgcgggccaccgccgacgaggacctgcggacggccatcctgctgctggcacacggctcccgggacgaggtgaacgagacctgcggggagggagacggccgcacggcgctgcatctggcctgccgcaaggggaatgtggtcctggcgcagctcctgatctggtacggagtggacgtcacggcccgagatgcccacgggaacacagctctggcctacgcccggcaggcctccagccaggagtgcatcgacgtgctgctgcagtacggctgccccgacgagcgcttcgtgctcatggccacccctaacctgtccaggagaaacaataaccggaacaacagcagtgggagggtgcccaccatcatctga

SEQ ID NO: 27 - DNA, 4491 bp, Homo sapiens
  source 1..4491: mol_type = unassigned DNA
atgggagccatcgggctcctgtggctcctgccgctgctgctttccacggcagctgtgggctccgggatggggaccggccagcgcgcgggctccccagctgcggggccgccgctgcagccccgggagccactcagctactcgcgcctgcagaggaagagtctggcagttgacttcgtggtgccctcgctcttccgtgtctacgcccgggacctactgctgccaccatcctcctcggagctgaaggctggcaggcccgaggcccgcggctcgctagctctggactgcgccccgctgctcaggttgctggggccggcgccgggggtctcctggaccgccggttcaccagccccggcagaggcccggacgctgtccagggtgctgaagggcggctccgtgcgcaagctccggcgtgccaagcagttggtgctggagctgggcgaggaggcgatcttggagggttgcgtcgggccccccggggaggcggctgtggggctgctccagttcaatctcagcgagctgttcagttggtggattcgccaaggcgaagggcgactgaggatccgcctgatgcccgagaagaaggcgtcggaagtgggcagagagggaaggctgtccgcggcaattcgcgcctcccagccccgccttctcttccagatcttcgggactggtcatagctccttggaatcaccaacaaacatgccttctccttctcctgattattttacatggaatctcacctggataatgaaagactccttccctttcctgtctcatcgcagccgatatggtctggagtgcagctttgacttcccctgtgagctggagtattcccctccactgcatgacctcaggaaccagagctggtcctggcgccgcatcccctccgaggaggcctcccagatggacttgctggatgggcctggggcagagcgttctaaggagatgcccagaggctcctttctccttctcaacacctcagctgactccaagcacaccatcctgagtccgtggatgaggagcagcagtgagcactgcacactggccgtctcggtgcacaggcacctgcagccctctggaaggtacattgcccagctgctgccccacaacgaggctgcaagagagatcctcctgatgcccactccagggaagcatggttggacagtgctccagggaagaatcgggcgtccagacaacccatttcgagtggccctggaatacatctccagtggaaaccgcagcttgtctgcagtggacttctttgccctgaagaactgcagtgaaggaacatccccaggctccaagatggccctgcagagctccttcacttgttggaatgggacagtcctccagcttgggcaggcctgtgacttccaccaggactgtgcccagggagaagatgagagccagatgtgccggaaactgcctgtgggtttttactgcaactttgaagatggcttctgtggctggacccaaggcacactgtcaccccacactcctcaatggcaggtcaggaccctaaaggatgcccggttccaggaccaccaagaccatgctctattgctcagtaccactgatgtccccgcttctgaaagtgctacagtgaccagtgctacgtttcctgcaccgatcaagagctctccatgtgagctccgaatgtcctggctcattcgtggagtcttgaggggaaacgtgtccttggtgctagtggagaacaaaaccgggaaggagcaaggcaggatggtctggcatgtcgccgcctatgaaggcttgagcctgtggcagtggatggtgttgcctctcctcgatgtgtctgacaggttctggctgcagatggtcgcatggtggggacaaggatccagagccatcgtggcttttgacaatatctccatcagcctggactgctacctcaccattagcggagaggacaagatcctgcagaatacagcacccaaatcaagaaacctgtttgagagaaacccaaacaaggagctgaaacccggggaaaattcaccaagacagacccccatctttgaccctacagttcattggctgttcaccacatgtggggccagcgggccccatggccccacccaggcacagtgcaacaacgcctaccagaactccaacctgagcgtggaggtggggagcgagggccccctgaaaggcatccagatctggaaggtgccagccaccgacacctacagcatctcgggctacggagctgctggcgggaaaggcgggaagaacaccatgatgcggtcccacggcgtgtctgtgctgggcatcttcaacctggagaaggatgacatgctgtacatcctggttgggcagcagggagaggacgcctgccccagtacaaaccagttaatccagaaagtctgcattggagagaacaatgtgatagaagaagaaatccgtgtgaacagaagcgtgcatgagtgggcaggaggcggaggaggagggggtggagccacctacgtatttaagatgaaggatggagtgccggtgcccctgatcattgcagccggaggtggtggcagggcctacggggccaagacagacacgttccacccagagagactggagaataactcctcggttctagggctaaacggcaattccggagccgcaggtggtggaggtggctggaatgataacacttccttgctctgggccggaaaatctttgcaggagggtgccaccggaggacattcctgcccccaggccatgaagaagtgggggtgggagacaagagggggtttcggagggggtggaggggggtgctcctcaggtggaggaggcggaggatatataggcggcaatgcagcctcaaacaatgaccccgaaatggatggggaagatggggtttccttcatcagtccactgggcatcctgtacaccccagctttaaaagtgatggaaggccacggggaagtgaatattaagcattatctaaactgcagtcactgtgaggtagacgaatgtcacatggaccctgaaagccacaaggtcatctgcttctgtgaccacgggacggtgctggctgaggatggcgtctcctgcattgtgtcacccaccccggagccacacctgccactctcgctgatcctctctgtggtgacctctgccctcgtggccgccctggtcctggctttctccggcatcatgattgactggatgactatgcctgccagtaagaaatctactgtcaaggcagagattcctgaagaagaattggatcaatggacaataaaggaaagattcagtagcagtagtcactggaagtgtgctagcctgctggagtggcaatgtggaggccaggagatcagtttgcagcgagtggtactcactcaccccaacaccccatcacaggaatgtgatgaatccgggagcactatgagctcatctcttcacagtgatcaaagtcagggatttcaacctagcaaaaatgcctttgagtgtagtgagtgtggaaaagtcttctctaagagttcaactcttaataaacatcagaaaattcataatgaaaaaaatgcaaatcagaaaattcatattaaggagaaaagatatgaatgtagagaatgtgggaaagcctttcaccagagtacgcaccttatccatcaccaaagaattcacactggcgagaaaccctatgaatgtaaggaatgtggcaaggccttctcagtgagctcctcacttacgtaccatcagaaaattcatactggagagaagccttttgaatgcaacttatgtggaaaagcttttatccgaaatatacaccttgcccatcatcatagaatacatactggagagaaaccttttaaatgtaacatttgtgaaaaagcctttgtgtgcagggcacaccttaccaaacaccagaatatccacagtggagagaaaccctataaatgcaatgaatgtggaaaagcctttaatcagagtacaagtttccttcagcatcagagaattcacactggagagaaaccctttgaatgtaatgaatgtgggaaggccttcagggtgaactcttcccttactgaacatcagagaattcatactggagagaaaccttataaatgtaatgaatgtgggaaagctttcagggataattcatcctttgcacgacatcggaaaattcacactggagagaaaccttacagatgtggcttgtgtgagaaagcctttcgggaccaatcagcactagcccaacatcagagaattcatactggggaaaaaccttatacatgtaacatatgtgaaaaagccttcagtgaccattcagcccttacccaacataagagaattcatactagggaaaaaccttacaaatgtaaaatctgtgagaaagcctttatccgaagcactcacctgactcaacatcagaggattcacacaggagagaaaccctataaatgtaataaatgtgggaaagcttttaaccagactgcaaacctcattcagcatcagagacatcatattggagagaagtga

SEQ ID NO: 28 - DNA, 2610 bp, Homo sapiens
  source 1..2610: mol_type = unassigned DNA
atggagcagtcgccgccgccggcgcccgagccgacccaagggccgacccccgcaaggagccgaaggcggcgggagccagagtcgccgccggcgtcggcgccgacaaaccagttaatccagaaagtctgcattggagagaacaatgtgatagaagaagaaatccgtgtgaacagaagcgtgcatgagtgggcaggaggcggaggaggagggggtggagccacctacgtatttaagatgaaggatggagtgccggtgcccctgatcattgcagccggaggtggtggcagggcctacggggccaagacagacacgttccacccagagagactggagaataactcctcggttctagggctaaacggcaattccggagccgcaggtggtggaggtggctggaatgataacacttccttgctctgggccggaaaatctttgcaggagggtgccaccggaggacattcctgcccccaggccatgaagaagtgggggtgggagacaagagggggtttcggagggggtggaggggggtgctcctcaggtggaggaggcggaggatatataggcggcaatgcagcctcaaacaatgaccccgaaatggatggggaagatggggtttccttcatcagtccactgggcatcctgtacaccccagctttaaaagtgatggaaggccacggggaagtgaatattaagcattatctaaactgcagtcactgtgaggtagacgaatgtcacatggaccctgaaagccacaaggtcatctgcttctgtgaccacgggacggtgctggctgaggatggcgtctcctgcattgtgtcacccaccccggagccacacctgccactctcgctgatcctctctgtggtgacctctgccctcgtggccgccctggtcctggctttctccggcatcatgattgtgtaccgccggaagcaccaggagctgcaagccatgcagatggagctgcagagccctgagtacaagctgagcaagctccgcacctcgaccatcatgaccgactacaaccccaactactgctttgctggcaagacctcctccatcagtgacctgaaggaggtgccgcggaaaaacatcaccctcattcggggtctgggccatggcgcctttggggaggtgtatgaaggccaggtgtccggaatgcccaacgacccaagccccctgcaagtggctgtgaagacgctgcctgaagtgtgctctgaacaggacgaactggatttcctcatggaagccctgatcatcagcaaattcaaccaccagaacattgttcgctgcattggggtgagcctgcaatccctgccccggttcatcctgctggagctcatggcggggggagacctcaagtccttcctccgagagacccgccctcgcccgagccagccctcctccctggccatgctggaccttctgcacgtggctcgggacattgcctgtggctgtcagtatttggaggaaaaccacttcatccaccgagacattgctgccagaaactgcctcttgacctgtccaggccctggaagagtggccaagattggagacttcgggatggcccgagacatctacagggcgagctactatagaaagggaggctgtgccatgctgccagttaagtggatgcccccagaggccttcatggaaggaatattcacttctaaaacagacacatggtcctttggagtgctgctatgggaaatcttttctcttggatatatgccataccccagcaaaagcaaccaggaagttctggagtttgtcaccagtggaggccggatggacccacccaagaactgccctgggcctgtataccggataatgactcagtgctggcaacatcagcctgaagacaggcccaactttgccatcattttggagaggattgaatactgcacccaggacccggatgtaatcaacaccgctttgccgatagaatatggtccacttgtggaagaggaagagaaagtgcctgtgaggcccaaggaccctgagggggttcctcctctcctggtctctcaacaggcaaaacgggaggaggagcgcagcccagctgccccaccacctctgcctaccacctcctctggcaaggctgcaaagaaacccacagctgcagagatctctgttcgagtccctagagggccggccgtggaagggggacacgtgaatatggcattctctcagtccaaccctccttcggagttgcacaaggtccacggatccagaaacaagcccaccagcttgtggaacccaacgtacggctcctggtttacagagaaacccaccaaaaagaataatcctatagcaaagaaggagccacacgacaggggtaacctggggctggagggaagctgtactgtcccacctaacgttgcaactgggagacttccgggggcctcactgctcctagagccctcttcgctgactgccaatatgaaggaggtacctctgttcaggctacgtcacttcccttgtgggaatgtcaattacggctaccagcaacagggcttgcccttagaagccgctactgcccctggagctggtcattacgaggataccattctgaaaagcaagaatagcatgaaccagcctgggccctga

SEQ ID NO: 29 - DNA, 2541 bp, Homo sapiens
  source 1..2541: mol_type = unassigned DNA
atggaatcagcaagagaaaacatcgaccttcaaacaaaccagttaatccagaaagtctgcattggagagaacaatgtgatagaagaagaaatccgtgtgaacagaagcgtgcatgagtgggcaggaggcggaggaggagggggtggagccacctacgtatttaagatgaaggatggagtgccggtgcccctgatcattgcagccggaggtggtggcagggcctacggggccaagacagacacgttccacccagagagactggagaataactcctcggttctagggctaaacggcaattccggagccgcaggtggtggaggtggctggaatgataacacttccttgctctgggccggaaaatctttgcaggagggtgccaccggaggacattcctgcccccaggccatgaagaagtgggggtgggagacaagagggggtttcggagggggtggaggggggtgctcctcaggtggaggaggcggaggatatataggcggcaatgcagcctcaaacaatgaccccgaaatggatggggaagatggggtttccttcatcagtccactgggcatcctgtacaccccagctttaaaagtgatggaaggccacggggaagtgaatattaagcattatctaaactgcagtcactgtgaggtagacgaatgtcacatggaccctgaaagccacaaggtcatctgcttctgtgaccacgggacggtgctggctgaggatggcgtctcctgcattgtgtcacccaccccggagccacacctgccactctcgctgatcctctctgtggtgacctctgccctcgtggccgccctggtcctggctttctccggcatcatgattgtgtaccgccggaagcaccaggagctgcaagccatgcagatggagctgcagagccctgagtacaagctgagcaagctccgcacctcgaccatcatgaccgactacaaccccaactactgctttgctggcaagacctcctccatcagtgacctgaaggaggtgccgcggaaaaacatcaccctcattcggggtctgggccatggcgcctttggggaggtgtatgaaggccaggtgtccggaatgcccaacgacccaagccccctgcaagtggctgtgaagacgctgcctgaagtgtgctctgaacaggacgaactggatttcctcatggaagccctgatcatcagcaaattcaaccaccagaacattgttcgctgcattggggtgagcctgcaatccctgccccggttcatcctgctggagctcatggcggggggagacctcaagtccttcctccgagagacccgccctcgcccgagccagccctcctccctggccatgctggaccttctgcacgtggctcgggacattgcctgtggctgtcagtatttggaggaaaaccacttcatccaccgagacattgctgccagaaactgcctcttgacctgtccaggccctggaagagtggccaagattggagacttcgggatggcccgagacatctacagggcgagctactatagaaagggaggctgtgccatgctgccagttaagtggatgcccccagaggccttcatggaaggaatattcacttctaaaacagacacatggtcctttggagtgctgctatgggaaatcttttctcttggatatatgccataccccagcaaaagcaaccaggaagttctggagtttgtcaccagtggaggccggatggacccacccaagaactgccctgggcctgtataccggataatgactcagtgctggcaacatcagcctgaagacaggcccaactttgccatcattttggagaggattgaatactgcacccaggacccggatgtaatcaacaccgctttgccgatagaatatggtccacttgtggaagaggaagagaaagtgcctgtgaggcccaaggaccctgagggggttcctcctctcctggtctctcaacaggcaaaacgggaggaggagcgcagcccagctgccccaccacctctgcctaccacctcctctggcaaggctgcaaagaaacccacagctgcagagatctctgttcgagtccctagagggccggccgtggaagggggacacgtgaatatggcattctctcagtccaaccctccttcggagttgcacaaggtccacggatccagaaacaagcccaccagcttgtggaacccaacgtacggctcctggtttacagagaaacccaccaaaaagaataatcctatagcaaagaaggagccacacgacaggggtaacctggggctggagggaagctgtactgtcccacctaacgttgcaactgggagacttccgggggcctcactgctcctagagccctcttcgctgactgccaatatgaaggaggtacctctgttcaggctacgtcacttcccttgtgggaatgtcaattacggctaccagcaacagggcttgcccttagaagccgctactgcccctggagctggtcattacgaggataccattctgaaaagcaagaatagcatgaaccagcctgggccctga

SEQ ID NO: 30 - DNA, 11973 bp, Homo sapiens
  source 1..11973: mol_type = unassigned DNA
atggccaagtatggagaacatgaagccagtcctgacaatgggcagaacgaattcagtgatatcattaagtccagatctgatgaacacaatgacgtacagaagaaaacctttaccaaatggataaatgctcgattttcaaagagtgggaaaccacccatcaatgatatgttcacagacctcaaagatggaaggaagctattggatcttctagaaggcctcacaggaacatcactgccaaaggaacgtggttccacaagggtacatgccttaaataacgtcaacagagtgctgcaggttttacatcagaacaatgtggaattagtgaatatagggggaactgacattgtggatggaaatcacaaactgactttggggttactttggagcatcattttgcactggcaggtgaaagatgtcatgaaggatgtcatgtcggacctgcagcagacgaacagtgagaagatcctgctcagctgggtgcgtcagaccaccaggccctacagccaagtcaacgtcctcaacttcaccaccagctggacagatggactcgcctttaatgctgtcctccaccgacataaacctgatctcttcagctgggataaagttgtcaaaatgtcaccaattgagagacttgaacatgccttcagcaaggctcaaacttatttgggaattgaaaagctgttagatcctgaagatgttgccgttcagcttcctgacaagaaatccataattatgtatttaacatctttgtttgaggtgctacctcagcaagtcaccatagacgccatccgtgaggtagagacactcccaaggaaatataaaaaagaatgtgaagaagaggcaattaatatacagagtacagcgcctgaggaggagcatgagagtccccgagctgaaactcccagcactgtcactgaggttgacatggatctggacagctatcagattgcgttggaggaagtgctgacctggttgctttctgctgaggacactttccaggagcaggatgatatttctgatgatgttgaagaagtcaaagaccagtttgcaacccatgaagcttttatgatggaactgactgcacaccagagcagtgtgggcagcgtcctgcaggcaggcaaccaactgataacacaaggaactctgtcagacgaagaagaatttgagattcaggaacagatgaccctgctgaatgctagatgggaggctcttagggtggagagtatggacagacagtcccggctgcacgatgtgctgatggaactgcagaagaagcaactgcagcagctctccgcctggttaacactcacagaggagcgcattcagaagatggaaacttgccccctggatgatgatgtaaaatctctacaaaagctgctagaagaacataaaagtttgcaaagtgatcttgaggctgaacaggtgaaagtaaattcactaactcacatggtggtcattgttgatgaaaacagtggtgagagtgctacagctatcctagaagaccagttacagaaacttggtgagcgctggacagcagtatgccgttggactgaagaacgctggaataggttacaagaaatcaatatattgtggcaggaattattggaagaacagtgcttgttgaaagcttggttaaccgaaaaagaagaggctttaaataaagtccagacaagcaacttcaaagaccaaaaggaactaagtgtcagtgttcgacgtctggctattttgaaggaagacatggaaatgaagcgtcaaacattggatcagctgagtgagattggccaggatgtgggacaattacttgataattccaaggcatctaagaagatcaacagtgactcagaggaactgactcaaagatgggattctttggttcagagactagaagattcctccaaccaggtgactcaggctgtagcaaagctggggatgtctcagattcctcagaaggaccttttggagactgttcgtgtaagagaacaagcaattacaaaaaaatctaagcaggaactgcctcctcctcctcccccaaagaagagacagatccatgtggatattgaagctaagaaaaagtttgatgctataagtgcagagctgttgaactggattttgaaatggaaaactgccattcagaccacagagataaaagagtatatgaagatgcaagacacttccgaaatgaaaaagaagttgaaggcattagaaaaagaacagagagaaagaatccccagagcagatgaattaaaccaaactggacaaatccttgtggagcaaatgggaaaagaaggccttcctactgaagaaataaaaaatgttctggagaaggtttcatcagaatggaagaatgtatctcaacatttggaagatctagaaagaaagattcagctacaggaagatataaatgcttatttcaagcagcttgatgagcttgaaaaggtcatcaagacaaaggaggagtgggtaaaacacacttccatttctgaatcttcccggcagtccttgccaagcttgaaggattcctgtcagcgggaattgacaaatcttcttggccttcaccccaaaattgaaatggctcgtgcaagctgctcggccctgatgtctcagccttctgccccagattttgtccagcggggcttcgatagctttctgggccgctaccaagctgtacaagaggctgtagaggatcgtcaacaacatctagagaatgaactgaagggccaacctggacatgcatatctggaaacattgaaaacactgaaagatgtgctaaatgattcagaaaataaggcccaggtgtctctgaatgtccttaatgatcttgccaaggtggagaaggccctgcaagaaaaaaagacccttgatgaaatccttgagaatcagaaacctgcattacataaacttgcagaagaaacaaaggctctggagaaaaatgttcatcctgatgtagaaaaattatataagcaagaatttgatgatgtgcaaggaaagtggaacaagctaaaggtcttggtttccaaagatctacatttgcttgaggaaattgctctcacactcagagcttttgaggccgattcaacagtcattgagaagtggatggatggcgtgaaagacttcttaatgaaacagcaggctgcccaaggagacgacgcaggtctacagaggcagttagaccagtgctctgcatttgttaatgaaatagaaacaattgaatcatctctgaaaaacatgaaggaaatagagactaatcttcgaagtggtccagttgctggaataaaaacttgggtgcagacaagactaggtgactaccaaactcaactggagaaacttagcaaggagatcgctactcaaaaaagtaggttgtctgaaagtcaagaaaaagctgcgaacctgaagaaagacttggcagagatgcaggaatggatgacccaggccgaggaagaatatttggagcgggattttgagtacaagtcaccagaagagcttgagagtgctgtggaagagatgaagagggcaaaagaggatgtgttgcagaaggaggtgagagtgaagattctcaaggacaacatcaagttattagctgccaaggtgccctctggtggccaggagttgacgtctgagctgaatgttgtgctggagaattaccaacttctttgtaatagaattcgaggaaagtgccacacgctagaggaggtctggtcttgttggattgaactgcttcactatttggatcttgaaactacctggttaaacactttggaagagcggatgaagagcacagaggtcctgcctgagaagacggatgctgtcaacgaagccctggagtctctggaatctgttctgcgccacccggcagataatcgcacccagattcgagagcttggccagactctgattgatggggggatcctggatgatataatcagtgagaaactggaggctttcaacagccgatatgaagatctaagtcacctggcagagagcaagcagatttctttggaaaagcaactccaggtgctgcgggaaactgaccagatgcttcaagtcttgcaagagagcttgggggagctggacaaacagctcaccacatacctgactgacaggatagatgctttccaagttccacaggaagctcagaaaatccaagcagagatctcagcccatgagctaaccctagaggagttgagaagaaatatgcgttctcagcccctgacctccccagagagtaggactgccagaggaggaagtcagatggatgtgctacagaggaaactccgagaggtgtccacaaagttccagcttttccagaagccagctaacttcgagcagcgcatgctggactgcaagcgtgtgctggatggcgtgaaagcagaacttcacgttctggatgtgaaggacgtagaccctgacgtcatacagacgcacctggacaagtgtatgaaactgtataaaactttgagtgaagtcaaacttgaagtggaaactgtgattaaaacaggaagacatattgtccagaaacagcaaacggacaacccaaaagggatggatgagcagctgacttccctgaaggttctttacaatgacctgggcgcacaggtgacagaaggaaaacaggatctggaaagagcatcacagttggcccggaaaatgaagaaagaggctgcttctctctctgaatggctttctgctactgaaactgaattggtacagaagtccacttcagaaggtctgcttggtgacttggatacagaaatttcctgggctaaaaatgttctgaaggatctggaaaagagaaaagctgatttaaataccatcacagagagtagtgctgccctgcaaaacttgattgagggcagtgagcctattttagaagagaggctctgcgtccttaacgctgggtggagccgagttcgtacctggactgaagattggtgcaataccttgatgaaccatcagaaccagctagaaatatttgatgggaacgtggctcacataagtacctggctttatcaagctgaagctctattggatgaaattgaaaagaaaccaacaagtaaacaggaagaaattgtgaagcgtttagtatctgagctggatgatgccaacctccaggttgaaaatgtccgcgatcaagcccttattttgatgaatgcccgtggaagctcaagcagggagcttgtagaaccaaagttagctgagctgaataggaactttgaaaaggtgtctcaacatatcaaaagtgccaaattgctaattgctcaggaaccattataccaatgtttggtcaccactgaaacatttgaaactggtgtgcctttctctgacttggaaaaattagaaaatgacatagaaaatatgttaaaatttgtggaaaaacacttggaatccagtgatgaagatgaaaagatggatgaggagagtgcccagattgaggaagttctacaaagaggagaagaaatgttacatcaacctatggaagataataaaaaagaaaagatccgtttgcaattattacttttgcatactagatacaacaaaattaaggcaatccctattcaacagaggaaaatgggtcaacttgcttctggaattagatcatcacttcttcctacagattatctggttgaaattaacaaaattttactttgcatggatgatgttgaattatcgcttaatgttccagagctcaacactgctatttacgaagacttctcttttcaggaagactctctgaagaatatcaaagaccaactggacaaacttggagagcagattgcagtcattcatgaaaaacagccagatgtcatccttgaagcctctggacctgaagccattcagatcagagatacacttactcagctgaatgcaaaatgggacagaattaatagaatgtacagtgatcggaaaggttgttttgacagggcaatggaagaatggagacagttccattgtgaccttaatgacctcacacagtggataacagaggctgaagaattactggttgatacctgtgctccaggtggcagcctggacttagagaaagccaggatacatcagcaggaacttgaggtgggcatcagcagccaccagcccagttttgcagcactaaaccgaactggggatgggattgtgcagaaactctcccaggcagatggaagcttcttgaaagaaaaactggcaggtttaaaccaacgctgggatgcaattgttgcagaagtgaaggataggcagccaaggctaaaaggagaaagtaagcaggtgatgaagtacaggcatcagctagatgagattatctgttggttaacaaaggctgagcatgctatgcaaaagagatcaaccaccgaattgggagaaaacctgcaagaattaagagacttaactcaagaaatggaagtacatgctgaaaaactcaaatggctgaatagaactgaattggagatgctttcagataaaagtctgagtttacctgaaagggataaaatttcagaaagcttaaggactgtaaatatgacatggaataagatttgcagagaggtgcctaccaccctgaaggaatgcatccaggagcccagttctgtttcacagacaaggattgctgctcatcctaatgtccaaaaggtggtgctagtatcatctgcgtcagatattcctgttcagtctcatcgtacttcggaaatttcaattcctgctgatcttgataaaactataacagaactagccgactggctggtattaatcgaccagatgctgaagtccaacattgtcactgttggggatgtagaagagatcaataagaccgtttcccgaatgaaaattacaaaggctgacttagaacagcgccatcctcagctggattatgtttttacattggcacagaatttgaaaaataaagcttccagttcagatatgagaacagcaattacagaaaaattggaaagggtcaagaaccagtgggatggcacccagcatggcgttgagctaagacagcagcagcttgaggacatgattattgacagtcttcagtgggatgaccatagggaggagactgaagaactgatgagaaaatatgaggctcgactctatattcttcagcaagcccgacgggatccactcaccaaacaaatttctgataaccaaatactgcttcaagaactgggtcctggagatggtatcgtcatggcgttcgataacgtcctgcagaaactcctggaggaatatgggagtgatgacacaaggaatgtgaaagaaaccacagagtacttaaaaacatcatggatcaatctcaaacaaagtattgctgacagacagaacgccttggaggctgagtggaggacggtgcaggcctctcgcagagatctggaaaacttcctgaagtggatccaagaagcagagaccacagtgaatgtgcttgtggatgcctctcatcgggagaatgctcttcaggatagtatcttggccagggaactcaaacagcagatgcaggacatccaggcagaaattgatgcccacaatgacatatttaaaagcattgacggaaacaggcagaagatggtaaaagctttgggaaattctgaagaggctactatgcttcaacatcgactggatgatatgaaccaaagatggaatgacttaaaagcaaaatctgctagcatcagggcccatttggaggccagcgctgagaagtggaacaggttgctgatgtccttagaagaactgatcaaatggctgaatatgaaagatgaagagcttaagaaacaaatgcctattggaggagatgttccagccttacagctccagtatgaccattgtaaggccctgagacgggagttaaaggagaaagaatattctgtcctgaatgctgtcgaccaggcccgagttttcttggctgatcagccaattgaggcccctgaagagccaagaagaaacctacaatcaaaaacagaattaactcctgaggagagagcccaaaagattgccaaagccatgcgcaaacagtcttctgaagtcaaagaaaaatgggaaagtctaaatgctgtaactagcaattggcaaaagcaagtggacaaggcattggagaaactcagagacctgcagggagctatggatgacctggacgctgacatgaaggaggcagagtccgtgcggaatggctggaagcccgtgggagacttactcattgactcgctgcaggatcacattgaaaaaatcatggcatttagagaagaaattgcaccaatcaactttaaagttaaaacggtgaatgatttatccagtcagctgtctccacttgacctgcatccctctctaaagatgtctcgccagctagatgaccttaatatgcgatggaaacttttacaggtttctgtggatgatcgccttaaacagcttcaggaagcccacagagattttggaccatcctctcagcattttctctctacgtcagtccagctgccgtggcaaagatccatttcacataataaagtgccctattacatcaaccatcaaacacagaccacctgttgggaccatcctaaaatgaccgaactctttcaatcccttgctgacctgaataatgtacgtttttctgcctaccgtacagcaatcaaaatccgaagactacaaaaagcactatgtttggatctcttagagttgagtacaacaaatgaaattttcaaacagcacaagttgaaccaaaatgaccagctcctcagtgttccagatgtcatcaactgtctgacaacaacttatgatggacttgagcaaatgcataaggacctggtcaacgttccactctgtgttgatatgtgtctcaattggttgctcaatgtctatgacacgggtcgaactggaaaaattagagtgcagagtctgaagattggattaatgtctctctccaaaggtctcttggaagaaaaatacagatatctctttaaggaagttgcagggccaacagaaatgtgtgaccagaggcagctgggcctgttacttcatgatgccatccagatcccccggcagctaggtgaagtagcagcttttggaggcagtaatattgagcctagtgttcgcagctgcttccaacagaataacaataaaccagaaataagtgtgaaagagtttatagattggatgcatttggaaccacagtccatggtttggctcccagttttacatcgagtggcagcagcggagactgcaaaacatcaggccaaatgcaacatctgtaaagaatgtccaattgtcgggttcaggtatagaagccttaagcattttaactatgatgtctgccagagttgtttcttttcgggtcgaacagcaaaaggtcacaaattacattacccaatggtggaatattgtatacctacaacatctggggaagatgtacgagacttcacaaaggtacttaagaacaagttcaggtcgaagaagtactttgccaaacaccctcgacttggttacctgcctgtccagacagttcttgaaggtgacaacttagagactcctatcacactcatcagtatgtggccagagcactatgacccctcacaatctcctcaactgtttcatgatgacacccattcaagaatagaacaatatgccacacgactggcccagatggaaaggactaatgggtcttttctcactgatagcagctccaccacaggaagtgtggaagacgagcacgccctcatccagcagtattgccaaacactcggaggagagtccccagtgagccagccgcagagcccagctcagatcctgaagtcagtagagagggaagaacgtggagaactggagaggatcattgctgacctggaggaagaacaaagaaatctacaggtggagtatgagcagctgaaggaccagcacctccgaagggggctccctgtcggttcaccgccagagtcgattatatctccccatcacacgtctgaggattcagaacttatagcagaagcaaaactcctcaggcagcacaaaggtcggctggaggctaggatgcagattttagaagatcacaataaacagctggagtctcagctccaccgcctccgacagctgctggagcagcctgaatctgattcccgaatcaatggtgtttccccatgggcttctcctcagcattctgcactgagctactcgcttgatccagatgcctccggcccacagttccaccaggcagtgtcacccaccccggagccacacctgccactctcgctgatcctctctgtggtgacctctgccctcgtggccgccctggtcctggctttctccggcatcatgattgtgtaccgccggaagcaccaggagctgcaagccatgcagatggagctgcagagccctgagtacaagctgagcaagctccgcacctcgaccatcatgaccgactacaaccccaactactgctttgctggcaagacctcctccatcagtgacctgaaggaggtgccgcggaaaaacatcaccctcattcggggtctgggccatggcgcctttggggaggtgtatgaaggccaggtgtccggaatgcccaacgacccaagccccctgcaagtggctgtgaagacgctgcctgaagtgtgctctgaacaggacgaactggatttcctcatggaagccctgatcatcagcaaattcaaccaccagaacattgttcgctgcattggggtgagcctgcaatccctgccccggttcatcctgctggagctcatggcggggggagacctcaagtccttcctccgagagacccgccctcgcccgagccagccctcctccctggccatgctggaccttctgcacgtggctcgggacattgcctgtggctgtcagtatttggaggaaaaccacttcatccaccgagacattgctgccagaaactgcctcttgacctgtccaggccctggaagagtggccaagattggagacttcgggatggcccgagacatctacagggcgagctactatagaaagggaggctgtgccatgctgccagttaagtggatgcccccagaggccttcatggaaggaatattcacttctaaaacagacacatggtcctttggagtgctgctatgggaaatcttttctcttggatatatgccataccccagcaaaagcaaccaggaagttctggagtttgtcaccagtggaggccggatggacccacccaagaactgccctgggcctgtataccggataatgactcagtgctggcaacatcagcctgaagacaggcccaactttgccatcattttggagaggattgaatactgcacccaggacccggatgtaatcaacaccgctttgccgatagaatatggtccacttgtggaagaggaagagaaagtgcctgtgaggcccaaggaccctgagggggttcctcctctcctggtctctcaacaggcaaaacgggaggaggagcgcagcccagctgccccaccacctctgcctaccacctcctctggcaaggctgcaaagaaacccacagctgcagagatctctgttcgagtccctagagggccggccgtggaagggggacacgtgaatatggcattctctcagtccaaccctccttcggagttgcacaaggtccacggatccagaaacaagcccaccagcttgtggaacccaacgtacggctcctggtttacagagaaacccaccaaaaagaataatcctatagcaaagaaggagccacacgacaggggtaacctggggctggagggaagctgtactgtcccacctaacgttgcaactgggagacttccgggggcctcactgctcctagagccctcttcgctgactgccaatatgaaggaggtacctctgttcaggctacgtcacttcccttgtgggaatgtcaattacggctaccagcaacagggcttgcccttagaagccgctactgcccctggagctggtcattacgaggataccattctgaaaagcaagaatagcatgaaccagcctgggccctga

SEQ ID NO: 31 - DNA, 2424 bp, Homo sapiens
  source 1..2424: mol_type = unassigned DNA
atggtggactaccacgcggcgaaccagtcgtaccagtacggccccagcagcgcgggcaatggcgctggcggcgggggcagcatgggcgactacatggcccaggaggacgactgggaccgggacctgctgctggacccggcctgggagaagcagcagcgcaagaccttcacggcatggtgcaactcccacctgcggaaggcaggcacacagatcgagaacattgatgaggacttccgagacgggctcaagctcatgctgctcctggaggtcatatcaggggagcggttacctaagccggagcgggggaagatgagagtgcacaaaatcaacaatgtgaacaaagcgctggactttattgccagcaaaggcgtcaagctggtctccatcggggcagaagagattgtggacggcaacgcaaagatgaccctgggaatgatctggaccatcatccttaggttcgccatccaggacatctccgtggaagagacctcggccaaggaagggctccttctctggtgccagagaaagacagccccgtataagaacgtcaatgtgcagaacttccacatcagctggaaggatggtcttgccttcaatgccctgatccaccggcacagaccagagctgattgagtatgacaagctgaggaaggacgaccctgtcaccaacctgaacaatgccttcgaagtggctgagaaatacctcgacatccccaagatgctggatgcagaggtgtaccgccggaagcaccaggagctgcaagccatgcagatggagctgcagagccctgagtacaagctgagcaagctccgcacctcgaccatcatgaccgactacaaccccaactactgctttgctggcaagacctcctccatcagtgacctgaaggaggtgccgcggaaaaacatcaccctcattcggggtctgggccatggcgcctttggggaggtgtatgaaggccaggtgtccggaatgcccaacgacccaagccccctgcaagtggctgtgaagacgctgcctgaagtgtgctctgaacaggacgaactggatttcctcatggaagccctgatcatcagcaaattcaaccaccagaacattgttcgctgcattggggtgagcctgcaatccctgccccggttcatcctgctggagctcatggcggggggagacctcaagtccttcctccgagagacccgccctcgcccgagccagccctcctccctggccatgctggaccttctgcacgtggctcgggacattgcctgtggctgtcagtatttggaggaaaaccacttcatccaccgagacattgctgccagaaactgcctcttgacctgtccaggccctggaagagtggccaagattggagacttcgggatggcccgagacatctacagggcgagctactatagaaagggaggctgtgccatgctgccagttaagtggatgcccccagaggccttcatggaaggaatattcacttctaaaacagacacatggtcctttggagtgctgctatgggaaatcttttctcttggatatatgccataccccagcaaaagcaaccaggaagttctggagtttgtcaccagtggaggccggatggacccacccaagaactgccctgggcctgtataccggataatgactcagtgctggcaacatcagcctgaagacaggcccaactttgccatcattttggagaggattgaatactgcacccaggacccggatgtaatcaacaccgctttgccgatagaatatggtccacttgtggaagaggaagagaaagtgcctgtgaggcccaaggaccctgagggggttcctcctctcctggtctctcaacaggcaaaacgggaggaggagcgcagcccagctgccccaccacctctgcctaccacctcctctggcaaggctgcaaagaaacccacagctgcagagatctctgttcgagtccctagagggccggccgtggaagggggacacgtgaatatggcattctctcagtccaaccctccttcggagttgcacaaggtccacggatccagaaacaagcccaccagcttgtggaacccaacgtacggctcctggtttacagagaaacccaccaaaaagaataatcctatagcaaagaaggagccacacgacaggggtaacctggggctggagggaagctgtactgtcccacctaacgttgcaactgggagacttccgggggcctcactgctcctagagccctcttcgctgactgccaatatgaaggaggtacctctgttcaggctacgtcacttcccttgtgggaatgtcaattacggctaccagcaacagggcttgcccttagaagccgctactgcccctggagctggtcattacgaggataccattctgaaaagcaagaatagcatgaaccagcctgggccctga

SEQ ID NO: 32 - DNA, 2370 bp, Homo sapiens
  source 1..2370: mol_type = unassigned DNA
atgggacggccggagtctgcgggcggagggagtcgcgggccttttgagggaggaggcagagcgcgccgggccggtggcatcttccttactttgtccatcctccggactcgcgatcttccttccggagccatgtcagaaggagtggacttgattgatatatatgctgacgaggagttcaaccaggacccagagttcaacaatacagatcagattgacctgtatgatgatgtgctgacagccacctcacagccctcagatgacagaagcagcagcactgaaccacctcctcctgttcgccaggagccatctcccaagcccaacaacaagacccctgcaattctgtatacctacagtggcctgcgtaatagacgagctgccgtttatgtgggcagcttctcctggtggaccacagaccagcagctgatccaggttattcgctctataggagtctatgatgtggtggagttgaaatttgcagagaatcgagcaaatggccagtccaaagggtatgctgaggtggtggtagcctctgaaaactctgtccacaaattgttggaactcctaccagggaaagttcttaatggagaaaaagtggacgtgaggccggccacccggcagaacctgtcacagtttgaggcacaggctcggaaacgtgagtgtgtccgagtcccaagaggggtgtaccgccggaagcaccaggagctgcaagccatgcagatggagctgcagagccctgagtacaagctgagcaagctccgcacctcgaccatcatgaccgactacaaccccaactactgctttgctggcaagacctcctccatcagtgacctgaaggaggtgccgcggaaaaacatcaccctcattcggggtctgggccatggcgcctttggggaggtgtatgaaggccaggtgtccggaatgcccaacgacccaagccccctgcaagtggctgtgaagacgctgcctgaagtgtgctctgaacaggacgaactggatttcctcatggaagccctgatcatcagcaaattcaaccaccagaacattgttcgctgcattggggtgagcctgcaatccctgccccggttcatcctgctggagctcatggcggggggagacctcaagtccttcctccgagagacccgccctcgcccgagccagccctcctccctggccatgctggaccttctgcacgtggctcgggacattgcctgtggctgtcagtatttggaggaaaaccacttcatccaccgagacattgctgccagaaactgcctcttgacctgtccaggccctggaagagtggccaagattggagacttcgggatggcccgagacatctacagggcgagctactatagaaagggaggctgtgccatgctgccagttaagtggatgcccccagaggccttcatggaaggaatattcacttctaaaacagacacatggtcctttggagtgctgctatgggaaatcttttctcttggatatatgccataccccagcaaaagcaaccaggaagttctggagtttgtcaccagtggaggccggatggacccacccaagaactgccctgggcctgtataccggataatgactcagtgctggcaacatcagcctgaagacaggcccaactttgccatcattttggagaggattgaatactgcacccaggacccggatgtaatcaacaccgctttgccgatagaatatggtccacttgtggaagaggaagagaaagtgcctgtgaggcccaaggaccctgagggggttcctcctctcctggtctctcaacaggcaaaacgggaggaggagcgcagcccagctgccccaccacctctgcctaccacctcctctggcaaggctgcaaagaaacccacagctgcagagatctctgttcgagtccctagagggccggccgtggaagggggacacgtgaatatggcattctctcagtccaaccctccttcggagttgcacaaggtccacggatccagaaacaagcccaccagcttgtggaacccaacgtacggctcctggtttacagagaaacccaccaaaaagaataatcctatagcaaagaaggagccacacgacaggggtaacctggggctggagggaagctgtactgtcccacctaacgttgcaactgggagacttccgggggcctcactgctcctagagccctcttcgctgactgccaatatgaaggaggtacctctgttcaggctacgtcacttcccttgtgggaatgtcaattacggctaccagcaacagggcttgcccttagaagccgctactgcccctggagctggtcattacgaggataccattctgaaaagcaagaatagcatgaaccagcctgggccctga

SEQ ID NO: 33 - DNA, 2709 bp, Homo sapiens
  source 1..2709: mol_type = unassigned DNA
atggcggccgccaaggtggctttaaccaagagagcagatccagctgagcttagaacaatatttttgaagtatgcaagcattgagaaaaacggtgaatttttcatgtcccccaatgactttgtcactcgatacttgaacatttttggagaaagccagcctaatccaaagactgtggaacttttaagtggagtggtggatcagaccaaagatggattaatatcttttcaagaatttgttgcctttgaatctgtcctgtgtgcccctgatgctttgtttatggtagcctttcagctgtttgacaaagctggcaaaggagaagtaacttttgaggatgttaagcaagtttttggacagaccacaattcatcaacatattccatttaactgggattcagaatttgtgcaactacattttggaaaagaaagaaaaagacacctgacatatgcggaatttactcagtttttattggaaatacaactggagcacgcaaagcaagcctttgtgcaacgggacaatgctaggactgggagagtcacagccatcgacttccgagacatcatggtcaccatccgcccccatgtcttgactccttttgtagaagaatgtctagtagctgctgctggaggtaccacatcccatcaagttagtttctcctattttaatggatttaattcgctccttaacaacatggaactcattagaaagatctatagcactctggctggcaccaggaaagatgttgaagtgactaaggaggagtttgttctggcagctcagaaatttggtcaggttacacccatggaagttgacatcttgtttcagttagcagatttatatgagccaaggggacgtatgaccttagcagacattgaacggattgctcctctggaagagggaactctgccctttaacttggctgaggcccagaggcagaaggcctcaggtgattcagctcgaccagttcttctacaagttgcagagtcggcctacaggtttggtctgggttctgttgctggagtgtaccgccggaagcaccaggagctgcaagccatgcagatggagctgcagagccctgagtacaagctgagcaagctccgcacctcgaccatcatgaccgactacaaccccaactactgctttgctggcaagacctcctccatcagtgacctgaaggaggtgccgcggaaaaacatcaccctcattcggggtctgggccatggcgcctttggggaggtgtatgaaggccaggtgtccggaatgcccaacgacccaagccccctgcaagtggctgtgaagacgctgcctgaagtgtgctctgaacaggacgaactggatttcctcatggaagccctgatcatcagcaaattcaaccaccagaacattgttcgctgcattggggtgagcctgcaatccctgccccggttcatcctgctggagctcatggcggggggagacctcaagtccttcctccgagagacccgccctcgcccgagccagccctcctccctggccatgctggaccttctgcacgtggctcgggacattgcctgtggctgtcagtatttggaggaaaaccacttcatccaccgagacattgctgccagaaactgcctcttgacctgtccaggccctggaagagtggccaagattggagacttcgggatggcccgagacatctacagggcgagctactatagaaagggaggctgtgccatgctgccagttaagtggatgcccccagaggccttcatggaaggaatattcacttctaaaacagacacatggtcctttggagtgctgctatgggaaatcttttctcttggatatatgccataccccagcaaaagcaaccaggaagttctggagtttgtcaccagtggaggccggatggacccacccaagaactgccctgggcctgtataccggataatgactcagtgctggcaacatcagcctgaagacaggcccaactttgccatcattttggagaggattgaatactgcacccaggacccggatgtaatcaacaccgctttgccgatagaatatggtccacttgtggaagaggaagagaaagtgcctgtgaggcccaaggaccctgagggggttcctcctctcctggtctctcaacaggcaaaacgggaggaggagcgcagcccagctgccccaccacctctgcctaccacctcctctggcaaggctgcaaagaaacccacagctgcagagatctctgttcgagtccctagagggccggccgtggaagggggacacgtgaatatggcattctctcagtccaaccctccttcggagttgcacaaggtccacggatccagaaacaagcccaccagcttgtggaacccaacgtacggctcctggtttacagagaaacccaccaaaaagaataatcctatagcaaagaaggagccacacgacaggggtaacctggggctggagggaagctgtactgtcccacctaacgttgcaactgggagacttccgggggcctcactgctcctagagccctcttcgctgactgccaatatgaaggaggtacctctgttcaggctacgtcacttcccttgtgggaatgtcaattacggctaccagcaacagggcttgcccttagaagccgctactgcccctggagctggtcattacgaggataccattctgaaaagcaagaatagcatgaaccagcctgggccctga

SEQ ID NO: 34 - DNA, 4311 bp, Homo sapiens
  source 1..4311: mol_type = unassigned DNA
atggacgactcagaggtggagtcgaccgccagcatcttggcctctgtgaaggaacaagaggcccagtttgagaagctgacccgggcgctggaggaggaacggcgccacgtctcggcgcagctggaacgcgtccgggtctcaccacaagatgccaacccactcatggccaacggcacactcacccgccggcatcagaacggccggtttgtgggcgatgctgaccttgaaagacagaaattttcagatttgaaactcaacggaccccaggatcacagtcaccttctatatagcaccatccccaggatgcaggagccggggcagattgtggagacctacacggaggaggatcctgagggagccatgtctgtagtctctgtggagacctcagatgatgggaccactcggcgcacagagaccacggtcaagaaagtagtgaagactgtgacaacacggacagtacagccagtcgctatgggaccagacgggttgcctgtggatgcttcatcagtttctaacaactatatccagactttgggtcgtgatttccgcaagaatggcaatgggggacctggtccctatgtggggcaagctggcactgctacccttcctaggaacttccactaccctcctgatggttatagtcgccactatgaagatggttatccaggtggcagtgataactatggcagtctgtcccgggtgacccgcattgaggagcggtataggcccagcatggaaggctaccgggcacctagtagacaggatgtgtatgggccccaaccccaggttcgggtaggtgggagcagcgtggatctgcatcgctttcatccagagccttatgggctagaggatgaccagcgtagtatgggctatgatgacctggattatggtatgatgtctgattatggcactgcccgtcggactgggacaccctctgaccctcgtcggcgcctcaggagctatgaagacatgattggtgaggaggtgccatcggatcaatactactgggctcctttggcccagcatgagcgaggaagtttagcaagcttggatagcctgcgcaaaggagggcctccacctcctaattggagacagccagagctgccagaggtgatcgccatgcttggattccgcttggatgctgtcaagtccaatgcagctgcatacctgcaacacttatgctaccgcaatgacaaggtgaagactgacgtgcggaagctcaagggcatcccagtactggtgggattgttagaccatcccaaaaaggaagtgcaccttggagcctgtggagctctcaagaatatctcttttggacgtgaccaggataacaagattgccataaaaaactgtgatggtgtgcctgcccttgtgcgattgcttcgaaaggctcgtgatatggaccttactgaagttattaccggaaccctgtggaatctttcatcccatgactcaatcaaaatggagattgtggaccatgcactgcatgccttgacagatgaagtgatcattcctcattctggttgggagcgggaacctaatgaagactgtaagccacgccacattgagtgggaatcggtgctcaccaacacagctggctgccttaggaatgtaagctcagagaggagtgaagctcgccggaaacttcgggaatgtgatggtttagttgatgccctcattttcattgttcaggctgagattgggcagaaggattcagacagcaagcttgtagagaactgtgtttgccttcttcggaacttatcatatcaagttcaccgggagatcccacaggcagagcgttaccaagaggcagctcccaatgttgccaacaatactgggccacatgctgccagttgctttggggccaagaagggcaaagggaaaaaacctatagaggatccagcaaacgatacagtggatttccctaaaagaacgagtccagctcgaggctatgagctcttatttcagccagaggtggttcggatatacatctcacttcttaaggagagcaagactcctgccatcctagaagcctcagctggagctatccagaacttgtgtgctgggcgctggacgtatggtcgatacatccgctctgctctgcgtcaagagaaggctctttctgccatagctgacctcctgactaatgaacatgaacgggtggtgaaagctgcatctggagcactgagaaacctggctgtggatgctcgcaacaaagaattaattggtaaacatgctattcctaacttggtaaagaatctgccaggaggacagcagaactcctcttggaatttctctgaggacactgtcatctctattttgaacactatcaacgaggttatcgctgagaacttggaggctgccaaaaagcttcgagagacacagggtattgagaagctggtgttgatcaacaaatcagggaaccgctcagaaaaagaagttcgagcagcagcacttgtattacagacaatctggggatataaggaactgcggaagccactggaaaaagaaggatggaagaaatcagactttcaggtgaatctaaacaatgcttcccgaagccagagcagtcattcatatgatgatagtactctccctctcattgaccggaaccaaaaatcagtgtaccgccggaagcaccaggagctgcaagccatgcagatggagctgcagagccctgagtacaagctgagcaagctccgcacctcgaccatcatgaccgactacaaccccaactactgctttgctggcaagacctcctccatcagtgacctgaaggaggtgccgcggaaaaacatcaccctcattcggggtctgggccatggcgcctttggggaggtgtatgaaggccaggtgtccggaatgcccaacgacccaagccccctgcaagtggctgtgaagacgctgcctgaagtgtgctctgaacaggacgaactggatttcctcatggaagccctgatcatcagcaaattcaaccaccagaacattgttcgctgcattggggtgagcctgcaatccctgccccggttcatcctgctggagctcatggcggggggagacctcaagtccttcctccgagagacccgccctcgcccgagccagccctcctccctggccatgctggaccttctgcacgtggctcgggacattgcctgtggctgtcagtatttggaggaaaaccacttcatccaccgagacattgctgccagaaactgcctcttgacctgtccaggccctggaagagtggccaagattggagacttcgggatggcccgagacatctacagggcgagctactatagaaagggaggctgtgccatgctgccagttaagtggatgcccccagaggccttcatggaaggaatattcacttctaaaacagacacatggtcctttggagtgctgctatgggaaatcttttctcttggatatatgccataccccagcaaaagcaaccaggaagttctggagtttgtcaccagtggaggccggatggacccacccaagaactgccctgggcctgtataccggataatgactcagtgctggcaacatcagcctgaagacaggcccaactttgccatcattttggagaggattgaatactgcacccaggacccggatgtaatcaacaccgctttgccgatagaatatggtccacttgtggaagaggaagagaaagtgcctgtgaggcccaaggaccctgagggggttcctcctctcctggtctctcaacaggcaaaacgggaggaggagcgcagcccagctgccccaccacctctgcctaccacctcctctggcaaggctgcaaagaaacccacagctgcagagatctctgttcgagtccctagagggccggccgtggaagggggacacgtgaatatggcattctctcagtccaaccctccttcggagttgcacaaggtccacggatccagaaacaagcccaccagcttgtggaacccaacgtacggctcctggtttacagagaaacccaccaaaaagaataatcctatagcaaagaaggagccacacgacaggggtaacctggggctggagggaagctgtactgtcccacctaacgttgcaactgggagacttccgggggcctcactgctcctagagccctcttcgctgactgccaatatgaaggaggtacctctgttcaggctacgtcacttcccttgtgggaatgtcaattacggctaccagcaacagggcttgcccttagaagccgctactgcccctggagctggtcattacgaggataccattctgaaaagcaagaatagcatgaaccagcctgggccctga

SEQ ID NO: 35 - DNA, 2946 bp, Homo sapiens
  source 1..2946: mol_type = unassigned DNA
atgtcaggcctggtgttggggcagcgggatgagcctgcaggccaccggctcagccaagaggagatcctggggagcacacggctggtcagccaagggctagaggccctacgcagtgaacaccaggccgtgctgcaaagcctgtcccagaccattgagtgtctgcagcagggaggccatgaggaagggctggtgcatgagaaggcccggcagcttcgccgttctatggaaaacattgagctcgggctgagtgaggcccaggtgatgctggctctagccagccacctgagcacagtggagtcggagaaacagaagctgcgggctcaggtgcggcggctatgccaggagaaccagtggctgcgggatgagctggctggcacccagcagcggctacagcgcagtgaacaggctgtggctcagctggaggaggaaaagaagcacctggagttcctggggcagctgcggcagtatgatgaggatggacatacctcggaggagaaagaaggcgatgccaccaaggattccctggatgacctctttcctaatgaggaggaagaggaccccagcaatggcttgtcccgtggtcaaggtgctacagcagctcagcagggtggatatgagatcccagcaaggttgcggacgttgcacaacctggtgatccagtacgcagcccaaggtcgctatgaggtggccgtgccactctgtaagcaggcactagaggacctggagcgcacatcaggccgtggccaccctgatgtcgccaccatgctcaacatccttgctttggtgtatcgtgaccagaataagtataaggaagctgcccacctgctgaatgatgcccttagcatccgggagagcaccttgggacctgaccatcctgctgtggctgccacactcaacaatttggctgtgctctatggcaaaaggggcaagtacaaggaggcagagcctctgtgccagcgggcactggagattcgagaaaaggtcctgggcacgaatcatccagatgtggcaaaacagctgaacaacctggccctcttgtgccaaaaccagggcaagtatgaggccgtggaacgctactaccagcgagcactggccatctacgaggggcagctggggccggacaaccctaatgtagcccggaccaagaacaacctggcttcctgttacctgaaacagggcaaatatgctgaggctgagacactatacaaagagatcctgacccgtgcccatgtacaggagtttgggtctgtggatgtgtaccgccggaagcaccaggagctgcaagccatgcagatggagctgcagagccctgagtacaagctgagcaagctccgcacctcgaccatcatgaccgactacaaccccaactactgctttgctggcaagacctcctccatcagtgacctgaaggaggtgccgcggaaaaacatcaccctcattcggggtctgggccatggcgcctttggggaggtgtatgaaggccaggtgtccggaatgcccaacgacccaagccccctgcaagtggctgtgaagacgctgcctgaagtgtgctctgaacaggacgaactggatttcctcatggaagccctgatcatcagcaaattcaaccaccagaacattgttcgctgcattggggtgagcctgcaatccctgccccggttcatcctgctggagctcatggcggggggagacctcaagtccttcctccgagagacccgccctcgcccgagccagccctcctccctggccatgctggaccttctgcacgtggctcgggacattgcctgtggctgtcagtatttggaggaaaaccacttcatccaccgagacattgctgccagaaactgcctcttgacctgtccaggccctggaagagtggccaagattggagacttcgggatggcccgagacatctacagggcgagctactatagaaagggaggctgtgccatgctgccagttaagtggatgcccccagaggccttcatggaaggaatattcacttctaaaacagacacatggtcctttggagtgctgctatgggaaatcttttctcttggatatatgccataccccagcaaaagcaaccaggaagttctggagtttgtcaccagtggaggccggatggacccacccaagaactgccctgggcctgtataccggataatgactcagtgctggcaacatcagcctgaagacaggcccaactttgccatcattttggagaggattgaatactgcacccaggacccggatgtaatcaacaccgctttgccgatagaatatggtccacttgtggaagaggaagagaaagtgcctgtgaggcccaaggaccctgagggggttcctcctctcctggtctctcaacaggcaaaacgggaggaggagcgcagcccagctgccccaccacctctgcctaccacctcctctggcaaggctgcaaagaaacccacagctgcagagatctctgttcgagtccctagagggccggccgtggaagggggacacgtgaatatggcattctctcagtccaaccctccttcggagttgcacaaggtccacggatccagaaacaagcccaccagcttgtggaacccaacgtacggctcctggtttacagagaaacccaccaaaaagaataatcctatagcaaagaaggagccacacgacaggggtaacctggggctggagggaagctgtactgtcccacctaacgttgcaactgggagacttccgggggcctcactgctcctagagccctcttcgctgactgccaatatgaaggaggtacctctgttcaggctacgtcacttcccttgtgggaatgtcaattacggctaccagcaacagggcttgcccttagaagccgctactgcccctggagctggtcattacgaggataccattctgaaaagcaagaatagcatgaaccagcctgggccctga

SEQ ID NO: 36 - DNA, 2505 bp, Homo sapiens
  source 1..2505: mol_type = unassigned DNA
atgagtaacagccaccctcttcgcccctttactgcagtgggggaaattgatcatgtgcacattttgtctgaacatattggtgccttgttgattggggaagaatatggcgacgtcacattcgtggtggaaaagaaacgttttcctgcccacagggtaattttagcagccaggtgccaatattttcgagcattattatatggtggaatgcgagagtctcagcctgaagcagaaattcctctccaagacaccactgcagaagcattcacaatgctactcaaatatatctacactgggcgggcaacgctgacagatgagaaggaggaggtgctgctggactttttgagcctggctcataaatatggatttccagagctagaggattctacctctgagtatctctgcaccatacttaacattcagaatgtctgcatgacttttgatgttgccagtctctactcacttcccaagttaacttgtatgtgctgcatgtttatggataggaatgctcaggaagtcctctcaagtgaaggtttcctctccctttctaagacagcacttttaaacatcgtgttaagagactcatttgcagctcccgaaaaagatattttcctagccttattaaactggtgtaagcacaattcaaaggagaatcatgctgaaatcatgcaggctgtgcgtttacctctcatgagcctcacagagcttctgaatgttgtgaggccttcaggactgctgtctcctgatgccatcctggatgccattaaagtgcgatctgagagccgggatatggacctcaattatagaggcatgctcatgtaccgccggaagcaccaggagctgcaagccatgcagatggagctgcagagccctgagtacaagctgagcaagctccgcacctcgaccatcatgaccgactacaaccccaactactgctttgctggcaagacctcctccatcagtgacctgaaggaggtgccgcggaaaaacatcaccctcattcggggtctgggccatggcgcctttggggaggtgtatgaaggccaggtgtccggaatgcccaacgacccaagccccctgcaagtggctgtgaagacgctgcctgaagtgtgctctgaacaggacgaactggatttcctcatggaagccctgatcatcagcaaattcaaccaccagaacattgttcgctgcattggggtgagcctgcaatccctgccccggttcatcctgctggagctcatggcggggggagacctcaagtccttcctccgagagacccgccctcgcccgagccagccctcctccctggccatgctggaccttctgcacgtggctcgggacattgcctgtggctgtcagtatttggaggaaaaccacttcatccaccgagacattgctgccagaaactgcctcttgacctgtccaggccctggaagagtggccaagattggagacttcgggatggcccgagacatctacagggcgagctactatagaaagggaggctgtgccatgctgccagttaagtggatgcccccagaggccttcatggaaggaatattcacttctaaaacagacacatggtcctttggagtgctgctatgggaaatcttttctcttggatatatgccataccccagcaaaagcaaccaggaagttctggagtttgtcaccagtggaggccggatggacccacccaagaactgccctgggcctgtataccggataatgactcagtgctggcaacatcagcctgaagacaggcccaactttgccatcattttggagaggattgaatactgcacccaggacccggatgtaatcaacaccgctttgccgatagaatatggtccacttgtggaagaggaagagaaagtgcctgtgaggcccaaggaccctgagggggttcctcctctcctggtctctcaacaggcaaaacgggaggaggagcgcagcccagctgccccaccacctctgcctaccacctcctctggcaaggctgcaaagaaacccacagctgcagagatctctgttcgagtccctagagggccggccgtggaagggggacacgtgaatatggcattctctcagtccaaccctccttcggagttgcacaaggtccacggatccagaaacaagcccaccagcttgtggaacccaacgtacggctcctggtttacagagaaacccaccaaaaagaataatcctatagcaaagaaggagccacacgacaggggtaacctggggctggagggaagctgtactgtcccacctaacgttgcaactgggagacttccgggggcctcactgctcctagagccctcttcgctgactgccaatatgaaggaggtacctctgttcaggctacgtcacttcccttgtgggaatgtcaattacggctaccagcaacagggcttgcccttagaagccgctactgcccctggagctggtcattacgaggataccattctgaaaagcaagaatagcatgaaccagcctgggccctga

SEQ ID NO: 37 - skipped

SEQ ID NO: 38 - DNA, 2946 bp, Homo sapiens
  source 1..2946: mol_type = unassigned DNA
atgaaattccttatcttcgcatttttcggtggtgttcaccttttatccctgtgctctgggaaagctatatgcaagaatggcatctctaagaggacttttgaagaaataaaagaagaaatagccagctgtggagatgttgctaaagcaatcatcaacctagctgtttatggtaaagcccagaacagatcctatgagcgattggcacttctggttgatactgttggacccagactgagtggctccaagaacctagaaaaagccatccaaattatgtaccaaaacctgcagcaagatgggctggagaaagttcacctggagccagtgagaataccccactgggagaggggagaagaatcagctgtgatgctggagccaagaattcataagatagccatcctgggtcttggcagcagcattgggactcctccagaaggcattacagcagaagttctggtggtgacctctttcgatgaactgcagagaagggcctcagaagcaagagggaagattgttgtttataaccaaccttacatcaactactcaaggacggtgcaataccgaacgcagggggcggtggaagctgccaaggtgggggctttggcatctctcattcgatccgtggcctccttctccatctacagtcctcacacaggtattcaggaataccaggatggcgtgcccaagattccaacagcctgtattacggtggaagatgcagaaatgatgtcaagaatggcttctcatgggatcaaaattgtcattcagctaaagatgggggcaaagacctacccagatactgattccttcaacactgtagcagagatcactgggagcaaatatccagaacaggttgtactggtcagtggacatctggacagctgggatgttgggcagggtgccatggatgatggcggtggagcctttatatcatgggaagcactctcacttattaaagatcttgggctgcgtccaaagaggactctgcggctggtgctctggactgcagaagaacaaggtggagttggtgccttccagtattatcagttacacaaggtaaatatttccaactacagtctggtgatggagtctgacgcaggaaccttcttacccactgggctgcaattcactggcagtgaaaaggccagggccatcatggaggaggttatgagcctgctgcagcccctcaatatcactcaggtcctgagccatggagaagggacagacatcaacttttggatccaagctggagtgcctgtgtaccgccggaagcaccaggagctgcaagccatgcagatggagctgcagagccctgagtacaagctgagcaagctccgcacctcgaccatcatgaccgactacaaccccaactactgctttgctggcaagacctcctccatcagtgacctgaaggaggtgccgcggaaaaacatcaccctcattcggggtctgggccatggcgcctttggggaggtgtatgaaggccaggtgtccggaatgcccaacgacccaagccccctgcaagtggctgtgaagacgctgcctgaagtgtgctctgaacaggacgaactggatttcctcatggaagccctgatcatcagcaaattcaaccaccagaacattgttcgctgcattggggtgagcctgcaatccctgccccggttcatcctgctggagctcatggcggggggagacctcaagtccttcctccgagagacccgccctcgcccgagccagccctcctccctggccatgctggaccttctgcacgtggctcgggacattgcctgtggctgtcagtatttggaggaaaaccacttcatccaccgagacattgctgccagaaactgcctcttgacctgtccaggccctggaagagtggccaagattggagacttcgggatggcccgagacatctacagggcgagctactatagaaagggaggctgtgccatgctgccagttaagtggatgcccccagaggccttcatggaaggaatattcacttctaaaacagacacatggtcctttggagtgctgctatgggaaatcttttctcttggatatatgccataccccagcaaaagcaaccaggaagttctggagtttgtcaccagtggaggccggatggacccacccaagaactgccctgggcctgtataccggataatgactcagtgctggcaacatcagcctgaagacaggcccaactttgccatcattttggagaggattgaatactgcacccaggacccggatgtaatcaacaccgctttgccgatagaatatggtccacttgtggaagaggaagagaaagtgcctgtgaggcccaaggaccctgagggggttcctcctctcctggtctctcaacaggcaaaacgggaggaggagcgcagcccagctgccccaccacctctgcctaccacctcctctggcaaggctgcaaagaaacccacagctgcagagatctctgttcgagtccctagagggccggccgtggaagggggacacgtgaatatggcattctctcagtccaaccctccttcggagttgcacaaggtccacggatccagaaacaagcccaccagcttgtggaacccaacgtacggctcctggtttacagagaaacccaccaaaaagaataatcctatagcaaagaaggagccacacgacaggggtaacctggggctggagggaagctgtactgtcccacctaacgttgcaactgggagacttccgggggcctcactgctcctagagccctcttcgctgactgccaatatgaaggaggtacctctgttcaggctacgtcacttcccttgtgggaatgtcaattacggctaccagcaacagggcttgcccttagaagccgctactgcccctggagctggtcattacgaggataccattctgaaaagcaagaatagcatgaaccagcctgggccctga

SEQ ID NO: 39 - skipped

SEQ ID NO: 40 - DNA, 2808 bp, Homo sapiens
  source 1..2808: mol_type = unassigned DNA
atggcggatccagccgaatgcagcatcaaagtgatgtgccggttccggcccctcaacgaagcggagatcctccgcggggacaaattcatccccaaatttaaaggcgatgagaccgtggtgatcgggcaagggaagccatatgtcttcgacagagtgctacctcccaacacgacccaagagcaggtttacaatgcatgtgcgaagcaaattgtcaaagatgtccttgaaggttataacgggacgatttttgcgtatgggcagacttcatcaggaaaaacccacaccatggaggggaagctgcatgacccccagctcatggggatcatcccacgaattgcccatgatatctttgaccatatctactccatggatgagaacctggagtttcacataaaggtttcctattttgagatctacttggacaaaataagggacttacttgatgtatccaagaccaacttggctgttcatgaagataaaaacagagtcccgtatgtaaaggggtgcactgagcggtttgtgtcgagccctgaggaagtcatggatgtaatagatgaaggcaaagcaaaccgacacgtggctgtgacaaacatgaatgaacacagctctagaagtcacagtatcttcctgataaatattaaacaagagaatgtagagactgaaaaaaaactcagtgggaaactttatttggttgatttggctgggagcgaaaaggtcagcaaaactggtgccgagggagctgttcttgacgaagctaaaaatatcaataagtctttgtctgctcttggaaatgtgatctctgctttggcagaagggacaaaaacacatgtgccataccgggacagcaagatgactcggattcttcaggactctttgggtgggaactgcagaaccaccatcgtcatttgctgttctccttctgtcttcaatgaggctgagaccaagtccacactgatgttcggacagagagctaagaccatcaagaatacagtctctgtgaacctagaactgacagcagaagaatggaagaagaaatatgaaaaagagaaagagaaaaacaagactttgaagaatgttatccagcatctggagatggagctaaacaggtggaggaatgtgtaccgccggaagcaccaggagctgcaagccatgcagatggagctgcagagccctgagtacaagctgagcaagctccgcacctcgaccatcatgaccgactacaaccccaactactgctttgctggcaagacctcctccatcagtgacctgaaggaggtgccgcggaaaaacatcaccctcattcggggtctgggccatggcgcctttggggaggtgtatgaaggccaggtgtccggaatgcccaacgacccaagccccctgcaagtggctgtgaagacgctgcctgaagtgtgctctgaacaggacgaactggatttcctcatggaagccctgatcatcagcaaattcaaccaccagaacattgttcgctgcattggggtgagcctgcaatccctgccccggttcatcctgctggagctcatggcggggggagacctcaagtccttcctccgagagacccgccctcgcccgagccagccctcctccctggccatgctggaccttctgcacgtggctcgggacattgcctgtggctgtcagtatttggaggaaaaccacttcatccaccgagacattgctgccagaaactgcctcttgacctgtccaggccctggaagagtggccaagattggagacttcgggatggcccgagacatctacagggcgagctactatagaaagggaggctgtgccatgctgccagttaagtggatgcccccagaggccttcatggaaggaatattcacttctaaaacagacacatggtcctttggagtgctgctatgggaaatcttttctcttggatatatgccataccccagcaaaagcaaccaggaagttctggagtttgtcaccagtggaggccggatggacccacccaagaactgccctgggcctgtataccggataatgactcagtgctggcaacatcagcctgaagacaggcccaactttgccatcattttggagaggattgaatactgcacccaggacccggatgtaatcaacaccgctttgccgatagaatatggtccacttgtggaagaggaagagaaagtgcctgtgaggcccaaggaccctgagggggttcctcctctcctggtctctcaacaggcaaaacgggaggaggagcgcagcccagctgccccaccacctctgcctaccacctcctctggcaaggctgcaaagaaacccacagctgcagagatctctgttcgagtccctagagggccggccgtggaagggggacacgtgaatatggcattctctcagtccaaccctccttcggagttgcacaaggtccacggatccagaaacaagcccaccagcttgtggaacccaacgtacggctcctggtttacagagaaacccaccaaaaagaataatcctatagcaaagaaggagccacacgacaggggtaacctggggctggagggaagctgtactgtcccacctaacgttgcaactgggagacttccgggggcctcactgctcctagagccctcttcgctgactgccaatatgaaggaggtacctctgttcaggctacgtcacttcccttgtgggaatgtcaattacggctaccagcaacagggcttgcccttagaagccgctactgcccctggagctggtcattacgaggataccattctgaaaagcaagaatagcatgaaccagcctgggccctga

SEQ ID NO: 41 - DNA, 1785 bp, Homo sapiens
  source 1..1785: mol_type = unassigned DNA
atggctgtggctagcgatttctacctgcgctactacgtagggcacaagggcaagtttgggcacgagtttctggagttcgaatttcggccggacgtgtaccgccggaagcaccaggagctgcaagccatgcagatggagctgcagagccctgagtacaagctgagcaagctccgcacctcgaccatcatgaccgactacaaccccaactactgctttgctggcaagacctcctccatcagtgacctgaaggaggtgccgcggaaaaacatcaccctcattcggggtctgggccatggcgcctttggggaggtgtatgaaggccaggtgtccggaatgcccaacgacccaagccccctgcaagtggctgtgaagacgctgcctgaagtgtgctctgaacaggacgaactggatttcctcatggaagccctgatcatcagcaaattcaaccaccagaacattgttcgctgcattggggtgagcctgcaatccctgccccggttcatcctgctggagctcatggcggggggagacctcaagtccttcctccgagagacccgccctcgcccgagccagccctcctccctggccatgctggaccttctgcacgtggctcgggacattgcctgtggctgtcagtatttggaggaaaaccacttcatccaccgagacattgctgccagaaactgcctcttgacctgtccaggccctggaagagtggccaagattggagacttcgggatggcccgagacatctacagggcgagctactatagaaagggaggctgtgccatgctgccagttaagtggatgcccccagaggccttcatggaaggaatattcacttctaaaacagacacatggtcctttggagtgctgctatgggaaatcttttctcttggatatatgccataccccagcaaaagcaaccaggaagttctggagtttgtcaccagtggaggccggatggacccacccaagaactgccctgggcctgtataccggataatgactcagtgctggcaacatcagcctgaagacaggcccaactttgccatcattttggagaggattgaatactgcacccaggacccggatgtaatcaacaccgctttgccgatagaatatggtccacttgtggaagaggaagagaaagtgcctgtgaggcccaaggaccctgagggggttcctcctctcctggtctctcaacaggcaaaacgggaggaggagcgcagcccagctgccccaccacctctgcctaccacctcctctggcaaggctgcaaagaaacccacagctgcagagatctctgttcgagtccctagagggccggccgtggaagggggacacgtgaatatggcattctctcagtccaaccctccttcggagttgcacaaggtccacggatccagaaacaagcccaccagcttgtggaacccaacgtacggctcctggtttacagagaaacccaccaaaaagaataatcctatagcaaagaaggagccacacgacaggggtaacctggggctggagggaagctgtactgtcccacctaacgttgcaactgggagacttccgggggcctcactgctcctagagccctcttcgctgactgccaatatgaaggaggtacctctgttcaggctacgtcacttcccttgtgggaatgtcaattacggctaccagcaacagggcttgcccttagaagccgctactgcccctggagctggtcattacgaggataccattctgaaaagcaagaatagcatgaaccagcctgggccctga

SEQ ID NO: 42 - skipped

SEQ ID NO: 43 - DNA, 5619 bp, Homo sapiens; identical to SEQ ID NO: 1
  source 1..5619: mol_type = unassigned DNA

SEQ ID NO: 44 - protein, 1872 aa, Homo sapiens
MMSFVQKGSWLLLALLHPTIILAQQEAVEGGCSHLGQSYADRDVWKPEPCQICVCDSGSVLCDDIICDDQELDCPNPEIPFGECCAVCPQPPTAPTRPPNGQGPQGPKGDPGPPGIPGRNGDPGIPGQPGSPGSPGPPGICESCPTGPQNYSPQYDSYDVKSGVAVGGLAGYPGPAGPPGPPGPPGTSGHPGSPGSPGYQGPPGEPGQAGPSGPPGPPGAIGPSGPAGKDGESGRPGRPGERGLPGPPGIKGPAGIPGFPGMKGHRGFDGRNGEKGETGAPGLKGENGLPGENGAPGPMGPRGAPGERGRPGLPGAAGARGNDGARGSDGQPGPPGPPGTAGFPGSPGAKGEVGPAGSPGSNGAPGQRGEPGPQGHAGAQGPPGPPGINGSPGGKGEMGPAGIPGAPGLMGARGPPGPAGANGAPGLRGGAGEPGKNGAKGEPGPRGERGEAGIPGVPGAKGEDGKDGSPGEPGANGLPGAAGERGAPGFRGPAGPNGIPGEKGPAGERGAPGPAGPRGAAGEPGRDGVPGGPGMRGMPGSPGGPGSDGKPGPPGSQGESGRPGPPGPSGPRGQPGVMGFPGPKGNDGAPGKNGERGGPGGPGPQGPPGKNGETGPQGPPGPTGPGGDKGDTGPPGPQGLQGLPGTGGPPGENGKPGEPGPKGDAGAPGAPGGKGDAGAPGERGPPGLAGAPGLRGGAGPPGPEGGKGAAGPPGPPGAAGTPGLQGMPGERGGLGSPGPKGDKGEPGGPGADGVPGKDGPRGPTGPIGPPGPAGQPGDKGEGGAPGLPGIAGPRGSPGERGETGPPGPAGFPGAPGQNGEPGGKGERGAPGEKGEGGPPGVAGPPGGSGPAGPPGPQGVKGERGSPGGPGAAGFPGARGLPGPPGSNGNPGPPGPSGSPGKDGPPGPAGNTGAPGSPGVSGPKGDAGQPGEKGSPGAQGPPGAPGPLGIAGITGARGLAGPPGMPGPRGSPGPQGVKGESGKPGANGLSGERGPPGPQGLPGLAGTAGEPGRDGNPGSDGLPGRDGSPGGKGDRGENGSPGAPGAPGHPGPPGPVGPAGKSGDRGESGPAGPAGAPGPAGSRGAPGPQGPRGDKGETGERGAAGIKGHRGFPGNPGAPGSPGPAGQQGAIGSPGPAGPRGPVGPSGPPGKDGTSGHPGPIGPPGPRGNRGERGSEGSPGHPGQPGPPGPPGAPGPCCGGVGAAAIAGIGGEKAGGFAPYYGDEPMDFKINTDEIMTSLKSVNGQIESLISPDGSRKNPARNCRDLKFCHPELKSVSPTPEPHLPLSLILSVVTSALVAALVLAFSGIMIVYRRKHQELQAMQMELQSPEYKLSKLRTSTIMTDYNPNYCFAGKTSSISDLKEVPRKNITLIRGLGHGAFGEVYEGQVSGMPNDPSPLQVAVKTLPEVCSEQDELDFLMEALIISKFNHQNIVRCIGVSLQSLPRFILLELMAGGDLKSFLRETRPRPSQPSSLAMLDLLHVARDIACGCQYLEENHFIHRDIAARNCLLTCPGPGRVAKIGDFGMARDIYRASYYRKGGCAMLPVKWMPPEAFMEGIFTSKTDTWSFGVLLWEIFSLGYMPYPSKSNQEVLEFVTSGGRMDPPKNCPGPVYRIMTQCWQHQPEDRPNFAIILERIEYCTQDPDVINTALPIEYGPLVEEEEKVPVRPKDPEGVPPLLVSQQAKREEERSPAAPPPLPTTSSGKAAKKPTAAEISVRVPRGPAVEGGHVNMAFSQSNPPSELHKVHGSRNKPTSLWNPTYGSWFTEKPTKKNNPIAKKEPHDRGNLGLEGSCTVPPNVATGRLPGASLLLEPSSLTANMKEVPLFRLRHFPCGNVNYGYQQQGLPLEAATAPGAGHYEDTILKSKNSMNQPGP

SEQ ID NO: 45 - protein, 1505 aa, Homo sapiens
MSGEVRLRQLEQFILDGPAQTNGQCFSVETLLDILICLYDECNNSPLRREKNILEYLEWAKPFTSKVKQMRLHREDFEILKVIGRGAFGEVAVVKLKNADKVFAMKILNKWEMLKRAETACFREERDVLVNGDNKWITTLHYAFQDDNNLYLVMDYYVGGDLLTLLSKFEDRLPEDMARFYLAEMVIAIDSVHQLHYVHRDIKPDNILMDMNGHIRLADFGSCLKLMEDGTVQSSVAVGTPDYISPEILQAMEDGKGRYGPECDWWSLGVCMYEMLYGETPFYAESLVETYGKIMNHKERFQFPAQVTDVSENAKDLIRRLICSREHRLGQNGIEDFKKHPFFSGIDWDNIRNCEAPYIPEVSSPTDTSNFDVDDDCLKNSETMPPPTHTAFSGHHLPFVGFTYTSSCVLSDRSCLRVTAGPTSLDLDVNVQRTLDNNLATEAYERRIKRLEQEKLELSRKLQESTQTVQALQYSTVDGPLTASKDLEIKNLKEEIEKLRKQVTESSHLEQQLEEANAVRQELDDAFRQIKAYEKQIKTLQQEREDLNKELVQASERLKNQSKELKDAHCQRKLAMQEFMEINERLTELHTQKQKLARHVRDKEEEVDLVMQKVESLRQELRRTERAKKELEVHTEALAAEASKDRKLREQSEHYSKQLENELEGLKQKQISYSPGVCSIEHQQEITKLKTDLEKKSIFYEEELSKREGIHANEIKNLKKELHDSEGQQLALNKEIMILKDKLEKTRRESQSEREEFESEFKQQYEREKVLLTEENKKLTSELDKLTTLYENLSIHNQQLEEEVKDLADKKESVAHWEAQITEIIQWVSDEKDARGYLQALASKMTEELEALRNSSLGTRATDMPWKMRRFAKLDMSARLELQSALDAEIRAKQAIQEELNKVKASNIITECKLKDSEKKNLELLSEIEQLIKDTEELRSEKVYRRKHQELQAMQMELQSPEYKLSKLRTSTIMTDYNPNYCFAGKTSSISDLKEVPRKNITLIRGLGHGAFGEVYEGQVSGMPNDPSPLQVAVKTLPEVCSEQDELDFLMEALIISKFNHQNIVRCIGVSLQSLPRFILLELMAGGDLKSFLRETRPRPSQPSSLAMLDLLHVARDIACGCQYLEENHFIHRDIAARNCLLTCPGPGRVAKIGDFGMARDIYRASYYRKGGCAMLPVKWMPPEAFMEGIFTSKTDTWSFGVLLWEIFSLGYMPYPSKSNQEVLEFVTSGGRMDPPKNCPGPVYRIMTQCWQHQPEDRPNFAIILERIEYCTQDPDVINTALPIEYGPLVEEEEKVPVRPKDPEGVPPLLVSQQAKREEERSPAAPPPLPTTSSGKAAKKPTAAEISVRVPRGPAVEGGHVNMAFSQSNPPSELHKVHGSRNKPTSLWNPTYGSWFTEKPTKKNNPIAKKEPHDRGNLGLEGSCTVPPNVATGRLPGASLLLEPSSLTANMKEVPLFRLRHFPCGNVNYGYQQQGLPLEAATAPGAGHYEDTILKSKNSMNQPGP

SEQ ID NO: 46 - protein, 872 aa, Homo sapiens
MELQAARACFALLWGCALAAAAAAQGKEVVLLDFAAAGGELGWLTHPYGKGWDLMQNIMNDMPIYMYSVCNVMSGDQDNWLRTNWVYRGEAERIFIELKFTVRDCNSFPGGASSCKETFNLYYAESDLDYGTNFQKRLFTKIDTIAPDEITVSSDFEARHVKLNVEERSVGPLTRKGFYLAFQDIGACVALLSVRVYYKKCPELLQGLAHFPETIAGSDAPSLATVAGTCVDHAVVPPGGEEPRMHCAVDGEWLVPIGQCLCQAGYEKVEDACQVSPTPEPHLPLSLILSVVTSALVAALVLAFSGIMIVYRRKHQELQAMQMELQSPEYKLSKLRTSTIMTDYNPNYCFAGKTSSISDLKEVPRKNITLIRGLGHGAFGEVYEGQVSGMPNDPSPLQVAVKTLPEVCSEQDELDFLMEALIISKFNHQNIVRCIGVSLQSLPRFILLELMAGGDLKSFLRETRPRPSQPSSLAMLDLLHVARDIACGCQYLEENHFIHRDIAARNCLLTCPGPGRVAKIGDFGMARDIYRASYYRKGGCAMLPVKWMPPEAFMEGIFTSKTDTWSFGVLLWEIFSLGYMPYPSKSNQEVLEFVTSGGRMDPPKNCPGPVYRIMTQCWQHQPEDRPNFAIILERIEYCTQDPDVINTALPIEYGPLVEEEEKVPVRPKDPEGVPPLLVSQQAKREEERSPAAPPPLPTTSSGKAAKKPTAAEISVRVPRGPAVEGGHVNMAFSQSNPPSELHKVHGSRNKPTSLWNPTYGSWFTEKPTKKNNPIAKKEPHDRGNLGLEGSCTVPPNVATGRLPGASLLLEPSSLTANMKEVPLFRLRHFPCGNVNYGYQQQGLPLEAATAPGAGHYEDTILKSKNSMNQPGP

SEQ ID NO: 47 - protein, 1803 aa, Homo sapiens
MAVAELYTQYNRVWIPDPEEVWKSAEIAKDYRVGDKVLRLLLEDGTELDYSVNPESLPPLRNPDILVGENDLTALSYLHEPAVLHNLRIRFAESKLIYTYSGIILVAMNPYKQLPIYGDAIIHAYSGQNMGDMDPHIFAVAEEAYKQMARNNRNQSIIVSGESGAGKTVSARYAMRYFATVSKSGSNAHVEDKVLASNPITEAVGNAKTTRNDNSSRFGKYTEISFDEQNQIIGANMSTYLLEKSRVVFQSENERNYHIFYQLCASAQQSEFKHLKLGSAEEFNYTRMGGNTVIEGVNDRAEMVETQKTFTLLGFKEDFQMDVFKILAAILHLGNVQITAVGNERSSVSEDDSHLKVFCELLGLESGRVAQWLCNRKIVTSSETVVKPMTRPQAVNARDALAKKIYAHLFDFIVERINQALQFSGKQHTFIGVLDIYGFETFDVNSFEQFCINYANEKLQQQFNMHVFKLEQEEYMKEDIPWTLIDFYDNQPVIDLIEAKMGILELLDEECLLPHGTDENWLQKLYNNFVNRNPLFEKPRMSNTSFVIQHFADKVEYKCEGFLEKNRDTVYDMLVEILRASKFHLCANFFQENPTPPSPFGSMITVKSAKQVIKPNSKHFRTTVGSKFRSSLYLLMETLNATTPHYVRCIKPNDEKLPFEFDSKRIVQQLRACGVLETIRISAQSYPSRWTYIEFYSRYGILMTKQELSFSDKKEVCKVVLHRLIQDSNQYQFGKTKIFFRAGQVAYLEKLRLDKLRQSCVMVQKHMRGWLQRKKFLRERRAALIIQQYFRGQQTVRKAITAVALKEAWAAIIIQKHCRGYLVRSLYQLIRMATITMQAYSRGFLARRRYRKMLEEHKAVILQKYARAWLARRRFQSIRRFVLNIQLTYRVQRLQKKLEDQNKENHGLVEKLTSLAALRAGDVEKIQKLEAELEKAATHRRNYEEKGKRYRDAVEEKLAKLQKHNSELETQKEQIQLKLQEKTEELKEKMDNLTKQLFDDVQKEERQRMLLEKSFELKTQDYEKQIQSLKEEIKALKDEKMQLQHLVEGEHVTSDGLKAEVARLSKQVKTISEFEKEIELLQAQKIDVEKHVQSQKREMREKMSEITKQLLESYDIEDVRSRLSVEDLEHLNEDGELWFAYEGLKKATRVLESHFQSQKDCYEKEIEALNFKVVHLSQEINHLQKLFREENDINESIRHEVTRLTSENMMIPDFKQQISELEKQKQDLEIRLNEQAEKMKVYRRKHQELQAMQMELQSPEYKLSKLRTSTIMTDYNPNYCFAGKTSSISDLKEVPRKNITLIRGLGHGAFGEVYEGQVSGMPNDPSPLQVAVKTLPEVCSEQDELDFLMEALIISKFNHQNIVRCIGVSLQSLPRFILLELMAGGDLKSFLRETRPRPSQPSSLAMLDLLHVARDIACGCQYLEENHFIHRDIAARNCLLTCPGPGRVAKIGDFGMARDIYRASYYRKGGCAMLPVKWMPPEAFMEGIFTSKTDTWSFGVLLWEIFSLGYMPYPSKSNQEVLEFVTSGGRMDPPKNCPGPVYRIMTQCWQHQPEDRPNFAIILERIEYCTQDPDVINTALPIEYGPLVEEEEKVPVRPKDPEGVPPLLVSQQAKREEERSPAAPPPLPTTSSGKAAKKPTAAEISVRVPRGPAVEGGHVNMAFSQSNPPSELHKVHGSRNKPTSLWNPTYGSWFTEKPTKKNNPIAKKEPHDRGNLGLEGSCTVPPNVATGRLPGASLLLEPSSLTANMKEVPLFRLRHFPCGNVNYGYQQQGLPLEAATAPGAGHYEDTILKSKNSMNQPGP

SEQ ID NO: 48 - protein, 1200 aa, Homo sapiens
MEVAVEKAVAAAAAASAAASGGPSAAPSGENEAESRQGPDSERGGEAARLNLLDTCAVCHQNIQSRAPKLLPCLHSFCQRCLPAPQRYLMLPAPMLGSAETPPPVPAPGSPVSGSSPFATQVGVIRCPVCSQECAERHIIDNFFVKDTTEVPSSTVEKSNQVCTSCEDNAEANGFCVECVEWLCKTCIRAHQRVKFTKDHTVRQKEEVSPEAVGVTSQRPVFCPFHKKEQLKLYCETCDKLTCRDCQLLEHKEHRYQFIEEAFQNQKVIIDTLITKLMEKTKYIKFTGNQIQNRIIEVNQNQKQVEQDIKVAIFTLMVEINKKGKALLHQLESLAKDHRMKLMQQQQEVAGLSKQLEHVMHFSKWAVSSGSSTALLYSKRLITYRLRHLLRARCDASPVTNNTIQFHCDPSFWAQNIINLGSLVIEDKESQPQMPKQNPVVEQNSQPPSGLSSNQLSKFPTQISLAQLRLQHMQQQQPPPRLINFQNHSPKPNGPVLPPHPQQLRYPPNQNIPRQAIKPNPLQMAFLAQQAIKQWQISSGQGTPSTTNSTSSTPSSPTITSAAGYDGKAFGSPMIDLSSPVGGSYNLPSLPDIDCSSTIMLDNIVRKDTNIDHGQPRPPSNRTVQSPNSSVPSPGLAVYRRKHQELQAMQMELQSPEYKLSKLRTSTIMTDYNPNYCFAGKTSSISDLKEVPRKNITLIRGLGHGAFGEVYEGQVSGMPNDPSPLQVAVKTLPEVCSEQDELDFLMEALIISKFNHQNIVRCIGVSLQSLPRFILLELMAGGDLKSFLRETRPRPSQPSSLAMLDLLHVARDIACGCQYLEENHFIHRDIAARNCLLTCPGPGRVAKIGDFGMARDIYRASYYRKGGCAMLPVKWMPPEAFMEGIFTSKTDTWSFGVLLWEIFSLGYMPYPSKSNQEVLEFVTSGGRMDPPKNCPGPVYRIMTQCWQHQPEDRPNFAIILERIEYCTQDPDVINTALPIEYGPLVEEEEKVPVRPKDPEGVPPLLVSQQAKREEERSPAAPPPLPTTSSGKAAKKPTAAEISVRVPRGPAVEGGHVNMAFSQSNPPSELHKVHGSRNKPTSLWNPTYGSWFTEKPTKKNNPIAKKEPHDRGNLGLEGSCTVPPNVATGRLPGASLLLEPSSLTANMKEVPLFRLRHFPCGNVNYGYQQQGLPLEAATAPGAGHYEDTILKSKNSMNQPGP

SEQ ID NO: 49 - protein, 622 aa, Homo sapiens
MQAAALPEEIRWLLEDAEEFLAEGLRNENLSAVARDHRDHILRGFQQIKARYYWDFQPQVYRRKHQELQAMQMELQSPEYKLSKLRTSTIMTDYNPNYCFAGKTSSISDLKEVPRKNITLIRGLGHGAFGEVYEGQVSGMPNDPSPLQVAVKTLPEVCSEQDELDFLMEALIISKFNHQNIVRCIGVSLQSLPRFILLELMAGGDLKSFLRETRPRPSQPSSLAMLDLLHVARDIACGCQYLEENHFIHRDIAARNCLLTCPGPGRVAKIGDFGMARDIYRASYYRKGGCAMLPVKWMPPEAFMEGIFTSKTDTWSFGVLLWEIFSLGYMPYPSKSNQEVLEFVTSGGRMDPPKNCPGPVYRIMTQCWQHQPEDRPNFAIILERIEYCTQDPDVINTALPIEYGPLVEEEEKVPVRPKDPEGVPPLLVSQQAKREEERSPAAPPPLPTTSSGKAAKKPTAAEISVRVPRGPAVEGGHVNMAFSQSNPPSELHKVHGSRNKPTSLWNPTYGSWFTEKPTKKNNPIAKKEPHDRGNLGLEGSCTVPPNVATGRLPGASLLLEPSSLTANMKEVPLFRLRHFPCGNVNYGYQQQGLPLEAATAPGAGHYEDTILKSKNSMNQPGP

SEQ ID NO: 50 - protein, 876 aa, Homo sapiens
MFTLSQTSRAWFIDRARQAREERLVQKERERAAVVIQAHVRSFLCRSRLQRDIRREIDDFFKADDPESTKRSALCIFKIARKLLFLFRIKEDNERFEKLCRSILSSMDAENEPKVWYVSLACSKDLTLLWIQQIKNILWYCCDFLKQLKPEILQDSRLITLYLTMLVTFTDTSTWKILRGKGESLRPAMNHICANIMGHLNQHGFYSVLQILLTRGLARPRPCLSKGTLTAAFSLALRPVIAAQFSDNLIRPFLIHIMSVPALVTHLSTVTPERLTVLESHDMLRKFIIFLRDQDRCRDVCESLEGCHTLCLMVYRRKHQELQAMQMELQSPEYKLSKLRTSTIMTDYNPNYCFAGKTSSISDLKEVPRKNITLIRGLGHGAFGEVYEGQVSGMPNDPSPLQVAVKTLPEVCSEQDELDFLMEALIISKFNHQNIVRCIGVSLQSLPRFILLELMAGGDLKSFLRETRPRPSQPSSLAMLDLLHVARDIACGCQYLEENHFIHRDIAARNCLLTCPGPGRVAKIGDFGMARDIYRASYYRKGGCAMLPVKWMPPEAFMEGIFTSKTDTWSFGVLLWEIFSLGYMPYPSKSNQEVLEFVTSGGRMDPPKNCPGPVYRIMTQCWQHQPEDRPNFAIILERIEYCTQDPDVINTALPIEYGPLVEEEEKVPVRPKDPEGVPPLLVSQQAKREEERSPAAPPPLPTTSSGKAAKKPTAAEISVRVPRGPAVEGGHVNMAFSQSNPPSELHKVHGSRNKPTSLWNPTYGSWFTEKPTKKNNPIAKKEPHDRGNLGLEGSCTVPPNVATGRLPGASLLLEPSSLTANMKEVPLFRLRHFPCGNVNYGYQQQGLPLEAATAPGAGHYEDTILKSKNSMNQPGP

SEQ ID NO: 51 - protein, 1820 aa, Homo sapiens
MEEGHGLDLTYITERIIAVSFPAGCSEESYLHNLQEVTRMLKSKHGDNYLVLNLSEKRYDLTKLNPKIMDVGWPELHAPPLDKMCTICKAQESWLNSNLQHVVVIHCRGGKGRIGVVISSYMHFTNVSASADQALDRFAMKKFYDDKVSALMQPSQKRYVQFLSGLLSGSVKMNASPLFLHFVILHGTPNFDTGGVCRPFLKLYQAMQPVYTSGIYNVGPENPSRICIVIEPAQLLKGDVMVKCYHKKYRSATRDVIFRLQFHTGAVQGYGLVFGKEDLDNASKDDRFPDYGKVELVFSATPEKIQGSEHLYNDHGVIVDYNTTDPLIRWDSYENLSADGEVLHTQGPVDGSLYAKVRKKSSSDPGIPGGPQAIPATNSPDHSDHTLSVSSDSGHSTASARTDKTEERLAPGTRRGLSAQEKAELDQLLSGFGLEDPGSSLKEMTDARSKYSGTRHVVPAQVHVNGDAALKDRETDILDDEMPHHDLHSVDSLGTLSSSEGPQSAHLGPFTCHKSSQNSLLSDGFGSNVGEDPQGTLVPDLGLGMDGPYERERTFGSREPKQPQPLLRKPSVSAQMQAYGQSSYSTQTWVRQQQMVVAHQYSFAPDGEARLVSRCPADNPGLVQAQPRVPLTPTRGTSSRVAVQRGVGSGPHPPDTQQPSPSKAFKPRFPGDQVVNGAGPELSTGPSPGSPTLDIDQSIEQLNRLILELDPTFEPIPTHMNALGSQANGSVSPDSVGGGLRASSRLPDTGEGPSRATGRQGSSAEQPLGGRLRKLSLGQYDNDAGGQLPFSKCAWGKAGVDYAPNLPPFPSPADVKETMTPGYPQDLDIIDGRILSSKESMCSTPAFPVSPETPYVKTALRHPPFSPPEPPLSSPASQHKGGREPRSCPETLTHAVGMSESPIGPKSTMLRADASSTPSFQQAFASSCTISSNGPGQRRESSSSAERQWVESSPKPMVSLLGSGRPTGSPLSAEFSGTRKDSPVLSCFPPSELQAPFHSHELSLAEPPDSLAPPSSQAFLGFGTAPVGSGLPPEEDLGALLANSHGASPTPSIPLTATGAADNGFLSHNFLTVAPGHSSHHSPGLQGQGVTLPGQPPLPEKKRASEGDRSLGSVSPSSSGFSSPHSGSTISIPFPNVLPDFSKASEAASPLPDSPGDKLVIVKFVQDTSKFWYKADISREQAIAMLKDKEPGSFIVRDSHSFRGAYGLAMKVATPPPSVLQLNKKAGDLANELVRHFLIECTPKGVRLKGCSNEPYFVYRRKHQELQAMQMELQSPEYKLSKLRTSTIMTDYNPNYCFAGKTSSISDLKEVPRKNITLIRGLGHGAFGEVYEGQVSGMPNDPSPLQVAVKTLPEVCSEQDELDFLMEALIISKFNHQNIVRCIGVSLQSLPRFILLELMAGGDLKSFLRETRPRPSQPSSLAMLDLLHVARDIACGCQYLEENHFIHRDIAARNCLLTCPGPGRVAKIGDFGMARDIYRASYYRKGGCAMLPVKWMPPEAFMEGIFTSKTDTWSFGVLLWEIFSLGYMPYPSKSNQEVLEFVTSGGRMDPPKNCPGPVYRIMTQCWQHQPEDRPNFAIILERIEYCTQDPDVINTALPIEYGPLVEEEEKVPVRPKDPEGVPPLLVSQQAKREEERSPAAPPPLPTTSSGKAAKKPTAAEISVRVPRGPAVEGGHVNMAFSQSNPPSELHKVHGSRNKPTSLWNPTYGSWFTEKPTKKNNPIAKKEPHDRGNLGLEGSCTVPPNVATGRLPGASLLLEPSSLTANMKEVPLFRLRHFPCGNVNYGYQQQGLPLEAATAPGAGHYEDTILKSKNSMNQPGP

SEQ ID NO: 52 - protein, 692 aa, Homo sapiens
MEEKEDKHQQHKIEDAAITYVSENEEIKHEEKPGKSIHHSKSHVGRGRIYYAKFINTNARTYNEPFPYIDPKKGPEIQGDWWSHGKALEPVFLPPYDSKSTQRSDFQKPSCPLVLPVKHSKMQKPSCGIVYRRKHQELQAMQMELQSPEYKLSKLRTSTIMTDYNPNYCFAGKTSSISDLKEVPRKNITLIRGLGHGAFGEVYEGQVSGMPNDPSPLQVAVKTLPEVCSEQDELDFLMEALIISKFNHQNIVRCIGVSLQSLPRFILLELMAGGDLKSFLRETRPRPSQPSSLAMLDLLHVARDIACGCQYLEENHFIHRDIAARNCLLTCPGPGRVAKIGDFGMARDIYRASYYRKGGCAMLPVKWMPPEAFMEGIFTSKTDTWSFGVLLWEIFSLGYMPYPSKSNQEVLEFVTSGGRMDPPKNCPGPVYRIMTQCWQHQPEDRPNFAIILERIEYCTQDPDVINTALPIEYGPLVEEEEKVPVRPKDPEGVPPLLVSQQAKREEERSPAAPPPLPTTSSGKAAKKPTAAEISVRVPRGPAVEGGHVNMAFSQSNPPSELHKVHGSRNKPTSLWNPTYGSWFTEKPTKKNNPIAKKEPHDRGNLGLEGSCTVPPNVATGRLPGASLLLEPSSLTANMKEVPLFRLRHFPCGNVNYGYQQQGLPLEAATAPGAGHYEDTILKSKNSMNQPGP

SEQ ID NO: 53 - protein, 818 aa, Homo sapiens
MDALVEDDICILNHEKAHKRDTVTPVSIYSGDESVASHFALVTAYEDIKKRLKDSEKENSLLKKRIRFLEEKLIARFEEETSSVGREQVNKAYHAYREVCIDRDNLKSKLDKMNKDNSESLKVLNEQLQSKEVELLQLRTEVETQQVMRNLNPPSSNWEVEKLSCDLKIHGLEQELELMRKECSDLKIELQKAKQTDPYQEDNLKSRDLQKLSISSDNMQHAYWELKREMSNLHLVTQVQAELLRKLKTSTAIKKVYRRKHQELQAMQMELQSPEYKLSKLRTSTIMTDYNPNYCFAGKTSSISDLKEVPRKNITLIRGLGHGAFGEVYEGQVSGMPNDPSPLQVAVKTLPEVCSEQDELDFLMEALIISKFNHQNIVRCIGVSLQSLPRFILLELMAGGDLKSFLRETRPRPSQPSSLAMLDLLHVARDIACGCQYLEENHFIHRDIAARNCLLTCPGPGRVAKIGDFGMARDIYRASYYRKGGCAMLPVKWMPPEAFMEGIFTSKTDTWSFGVLLWEIFSLGYMPYPSKSNQEVLEFVTSGGRMDPPKNCPGPVYRIMTQCWQHQPEDRPNFAIILERIEYCTQDPDVINTALPIEYGPLVEEEEKVPVRPKDPEGVPPLLVSQQAKREEERSPAAPPPLPTTSSGKAAKKPTAAEISVRVPRGPAVEGGHVNMAFSQSNPPSELHKVHGSRNKPTSLWNPTYGSWFTEKPTKKNNPIAKKEPHDRGNLGLEGSCTVPPNVATGRLPGASLLLEPSSLTANMKEVPLFRLRHFPCGNVNYGYQQQGLPLEAATAPGAGHYEDTILKSKNSMNQPGP

SEQ ID NO: 54 - protein, 1234 aa, Homo sapiens
MRLHLLLLLALCGAGTTAAELSYSLRGNWSICNGNGSLELPGAVPGCVHSALFQQGLIQDSYYRFNDLNYRWVSLDNWTYSKEFKIPFEISKWQKVNLILEGVDTVSKILFNEVTIGETDNMFNRYSFDITNVVRDVNSIELRFQSAVLYAAQQSKAHTRYQVPPDCPPLVQKGECHVNFVRKEQCSFSWDWGPSFPTQGIWKDVRIEAYNICHLNYFTFSPIYDKSAQEWNLEIESTFDVVSSKPVGGQVIVAIPKLQTQQTYSIELQPGKRIVELFVNISKNITVETWWPHGHGNQTGYNMTVLFELDGGLNIEKSAKVYFRTVELIEEPIKGSPGLSFYFKINGFPIFLKGSNWIPADSFQDRVTSELLRLLLQSVVDANMNTLRVWGGGIYEQDEFYELCDELGIMVWQDFMFACALYPTDQGFLDSVTAEVAYQIKRLKSHPSIIIWSGNNENEEALMMNWYHISFTDRPIYIKDYVTLYVKNIRELVLAGDKSRPFITSSPTNGAETVAEAWVSQNPNSNYFGDVHFYDYISDCWNWKVFPKARFASEYGYQSWPSFSTLEKVSSTEDWSFNSKFSLHRQHHEGGNKQMLYQAGLHFKLPQSTDPLRTFKDTIYLTQVMQAQCVKTETEFYRRSRSEIVDQQGHTMGALYWQLNDIWQAPSWASLVYRRKHQELQAMQMELQSPEYKLSKLRTSTIMTDYNPNYCFAGKTSSISDLKEVPRKNITLIRGLGHGAFGEVYEGQVSGMPNDPSPLQVAVKTLPEVCSEQDELDFLMEALIISKFNHQNIVRCIGVSLQSLPRFILLELMAGGDLKSFLRETRPRPSQPSSLAMLDLLHVARDIACGCQYLEENHFIHRDIAARNCLLTCPGPGRVAKIGDFGMARDIYRASYYRKGGCAMLPVKWMPPEAFMEGIFTSKTDTWSFGVLLWEIFSLGYMPYPSKSNQEVLEFVTSGGRMDPPKNCPGPVYRIMTQCWQHQPEDRPNFAIILERIEYCTQDPDVINTALPIEYGPLVEEEEKVPVRPKDPEGVPPLLVSQQAKREEERSPAAPPPLPTTSSGKAAKKPTAAEISVRVPRGPAVEGGHVNMAFSQSNPPSELHKVHGSRNKPTSLWNPTYGSWFTEKPTKKNNPIAKKEPHDRGNLGLEGSCTVPPNVATGRLPGASLLLEPSSLTANMKEVPLFRLRHFPCGNVNYGYQQQGLPLEAATAPGAGHYEDTILKSKNSMNQPGP

SEQ ID NO: 55 - protein, 625 aa, Homo sapiens
MDSLPRLTSVLTLLFSGLWHLGLTATNYNCDDPLASLLSPMAFSSSSDLTGTHSPAQLNWRVVYRRKHQELQAMQMELQSPEYKLSKLRTSTIMTDYNPNYCFAGKTSSISDLKEVPRKNITLIRGLGHGAFGEVYEGQVSGMPNDPSPLQVAVKTLPEVCSEQDELDFLMEALIISKFNHQNIVRCIGVSLQSLPRFILLELMAGGDLKSFLRETRPRPSQPSSLAMLDLLHVARDIACGCQYLEENHFIHRDIAARNCLLTCPGPGRVAKIGDFGMARDIYRASYYRKGGCAMLPVKWMPPEAFMEGIFTSKTDTWSFGVLLWEIFSLGYMPYPSKSNQEVLEFVTSGGRMDPPKNCPGPVYRIMTQCWQHQPEDRPNFAIILERIEYCTQDPDVINTALPIEYGPLVEEEEKVPVRPKDPEGVPPLLVSQQAKREEERSPAAPPPLPTTSSGKAAKKPTAAEISVRVPRGPAVEGGHVNMAFSQSNPPSELHKVHGSRNKPTSLWNPTYGSWFTEKPTKKNNPIAKKEPHDRGNLGLEGSCTVPPNVATGRLPGASLLLEPSSLTANMKEVPLFRLRHFPCGNVNYGYQQQGLPLEAATAPGAGHYEDTILKSKNSMNQPGP

SEQ ID NO: 56 - skipped

SEQ ID NO: 57 - protein, 1429 aa, Homo sapiens
MAARQAVGSGAQETCGLDRILEALKLLLSPGGHSSLESPTNMPSPSPDYFTWNLTWIMKDSFPFLSHRSRYGLECSFDFPCELEYSPPLHDLRNQSWSWRRIPSEEASQMDLLDGPGAERSKEMPRGSFLLLNTSADSKHTILSPWMRSSSEHCTLAVSVHRHLQPSGRYIAQLLPHNEAAREILLMPTPGKHGWTVLQGRIGRPDNPFRVALEYISSGNRSLSAVDFFALKNCSEGTSPGSKMALQSSFTCWNGTVLQLGQACDFHQDCAQGEDESQMCRKLPVGFYCNFEDGFCGWTQGTLSPHTPQWQVRTLKDARFQDHQDHALLLSTTDVPASESATVTSATFPAPIKSSPCELRMSWLIRGVLRGNVSLVLVENKTGKEQGRMVWHVAAYEGLSLWQWMVLPLLDVSDRFWLQMVAWWGQGSRAIVAFDNISISLDCYLTISGEDKILQNTAPKSRNLFERNPNKELKPGENSPRQTPIFDPTVHWLFTTCGASGPHGPTQAQCNNAYQNSNLSVEVGSEGPLKGIQIWKVPATDTYSISGYGAAGGKGGKNTMMRSHGVSVLGIFNLEKDDMLYILVGQQGEDACPSTNQLIQKVCIGENNVIEEEIRVNRSVHEWAGGGGGGGGATYVFKMKDGVPVPLIIAAGGGGRAYGAKTDTFHPERLENNSSVLGLNGNSGAAGGGGGWNDNTSLLWAGKSLQEGATGGHSCPQAMKKWGWETRGGFGGGGGGCSSGGGGGGYIGGNAASNNDPEMDGEDGVSFISPLGILYTPALKVMEGHGEVNIKHYLNCSHCEVDECHMDPESHKVICFCDHGTVLAEDGVSCIVSPTPEPHLPLSLILSVVTSALVAALVLAFSGIMIVYRRKHQELQAMQMELQSPEYKLSKLRTSTIMTDYNPNYCFAGKTSSISDLKEVPRKNITLIRGLGHGAFGEVYEGQVSGMPNDPSPLQVAVKTLPEVCSEQDELDFLMEALIISKFNHQNIVRCIGVSLQSLPRFILLELMAGGDLKSFLRETRPRPSQPSSLAMLDLLHVARDIACGCQYLEENHFIHRDIAARNCLLTCPGPGRVAKIGDFGMARDIYRASYYRKGGCAMLPVKWMPPEAFMEGIFTSKTDTWSFGVLLWEIFSLGYMPYPSKSNQEVLEFVTSGGRMDPPKNCPGPVYRIMTQCWQHQPEDRPNFAIILERIEYCTQDPDVINTALPIEYGPLVEEEEKVPVRPKDPEGVPPLLVSQQAKREEERSPAAPPPLPTTSSGKAAKKPTAAEISVRVPRGPAVEGGHVNMAFSQSNPPSELHKVHGSRNKPTSLWNPTYGSWFTEKPTKKNNPIAKKEPHDRGNLGLEGSCTVPPNVATGRLPGASLLLEPSSLTANMKEVPLFRLRHFPCGNVNYGYQQQGLPLEAATAPGAGHYEDTILKSKNSMNQPGP

SEQ ID NO: 58 - protein, 1584 aa, Homo sapiens
MYSPLCLTQDEFHPFIEALLPHVRAFAYTWFNLQARKRKYFKKHEKRMSKEEERAVKDELLSEKPEVKQKWASRLLAKLRKDIRPEYREDFVLTVTGKKPPCCVLSNPDQKGKMRRIDCLRQADKVWRLDLVMVILFKGIPLESTDGERLVKSPQCSNPGLCVQPHHIGVSVKELDLYLAYFVHAAGHSSLESPTNMPSPSPDYFTWNLTWIMKDSFPFLSHRSRYGLECSFDFPCELEYSPPLHDLRNQSWSWRRIPSEEASQMDLLDGPGAERSKEMPRGSFLLLNTSADSKHTILSPWMRSSSEHCTLAVSVHRHLQPSGRYIAQLLPHNEAAREILLMPTPGKHGWTVLQGRIGRPDNPFRVALEYISSGNRSLSAVDFFALKNCSEGTSPGSKMALQSSFTCWNGTVLQLGQACDFHQDCAQGEDESQMCRKLPVGFYCNFEDGFCGWTQGTLSPHTPQWQVRTLKDARFQDHQDHALLLSTTDVPASESATVTSATFPAPIKSSPCELRMSWLIRGVLRGNVSLVLVENKTGKEQGRMVWHVAAYEGLSLWQWMVLPLLDVSDRFWLQMVAWWGQGSRAIVAFDNISISLDCYLTISGEDKILQNTAPKSRNLFERNPNKELKPGENSPRQTPIFDPTVHWLFTTCGASGPHGPTQAQCNNAYQNSNLSVEVGSEGPLKGIQIWKVPATDTYSISGYGAAGGKGGKNTMMRSHGVSVLGIFNLEKDDMLYILVGQQGEDACPSTNQLIQKVCIGENNVIEEEIRVNRSVHEWAGGGGGGGGATYVFKMKDGVPVPLIIAAGGGGRAYGAKTDTFHPERLENNSSVLGLNGNSGAAGGGGGWNDNTSLLWAGKSLQEGATGGHSCPQAMKKWGWETRGGFGGGGGGCSSGGGGGGYIGGNAASNNDPEMDGEDGVSFISPLGILYTPALKVMEGHGEVNIKHYLNCSHCEVDECHMDPESHKVICFCDHGTVLAEDGVSCIVSPTPEPHLPLSLILSVVTSALVAALVLAFSGIMIVYRRKHQELQAMQMELQSPEYKLSKLRTSTIMTDYNPNYCFAGKTSSISDLKEVPRKNITLIRGLGHGAFGEVYEGQVSGMPNDPSPLQVAVKTLPEVCSEQDELDFLMEALIISKFNHQNIVRCIGVSLQSLPRFILLELMAGGDLKSFLRETRPRPSQPSSLAMLDLLHVARDIACGCQYLEENHFIHRDIAARNCLLTCPGPGRVAKIGDFGMARDIYRASYYRKGGCAMLPVKWMPPEAFMEGIFTSKTDTWSFGVLLWEIFSLGYMPYPSKSNQEVLEFVTSGGRMDPPKNCPGPVYRIMTQCWQHQPEDRPNFAIILERIEYCTQDPDVINTALPIEYGPLVEEEEKVPVRPKDPEGVPPLLVSQQAKREEERSPAAPPPLPTTSSGKAAKKPTAAEISVRVPRGPAVEGGHVNMAFSQSNPPSELHKVHGSRNKPTSLWNPTYGSWFTEKPTKKNNPIAKKEPHDRGNLGLEGSCTVPPNVATGRLPGASLLLEPSSLTANMKEVPLFRLRHFPCGNVNYGYQQQGLPLEAATAPGAGHYEDTILKSKNSMNQPGP

SEQ ID NO: 59 - protein, 1139 aa, Homo sapiens
MEEEGGSSGGAAGTSADGGDGGEQLLTVKHELRTDHALLLSTTDVPASESATVTSATFPAPIKSSPCELRMSWLIRGVLRGNVSLVLVENKTGKEQGRMVWHVAAYEGLSLWQWMVLPLLDVSDRFWLQMVAWWGQGSRAIVAFDNISISLDCYLTISGEDKILQNTAPKSRNLFERNPNKELKPGENSPRQTPIFDPTVHWLFTTCGASGPHGPTQAQCNNAYQNSNLSVEVGSEGPLKGIQIWKVPATDTYSISGYGAAGGKGGKNTMMRSHGVSVLGIFNLEKDDMLYILVGQQGEDACPSTNQLIQKVCIGENNVIEEEIRVNRSVHEWAGGGGGGGGATYVFKMKDGVPVPLIIAAGGGGRAYGAKTDTFHPERLENNSSVLGLNGNSGAAGGGGGWNDNTSLLWAGKSLQEGATGGHSCPQAMKKWGWETRGGFGGGGGGCSSGGGGGGYIGGNAASNNDPEMDGEDGVSFISPLGILYTPALKVMEGHGEVNIKHYLNCSHCEVDECHMDPESHKVICFCDHGTVLAEDGVSCIVSPTPEPHLPLSLILSVVTSALVAALVLAFSGIMIVYRRKHQELQAMQMELQSPEYKLSKLRTSTIMTDYNPNYCFAGKTSSISDLKEVPRKNITLIRGLGHGAFGEVYEGQVSGMPNDPSPLQVAVKTLPEVCSEQDELDFLMEALIISKFNHQNIVRCIGVSLQSLPRFILLELMAGGDLKSFLRETRPRPSQPSSLAMLDLLHVARDIACGCQYLEENHFIHRDIAARNCLLTCPGPGRVAKIGDFGMARDIYRASYYRKGGCAMLPVKWMPPEAFMEGIFTSKTDTWSFGVLLWEIFSLGYMPYPSKSNQEVLEFVTSGGRMDPPKNCPGPVYRIMTQCWQHQPEDRPNFAIILERIEYCTQDPDVINTALPIEYGPLVEEEEKVPVRPKDPEGVPPLLVSQQAKREEERSPAAPPPLPTTSSGKAAKKPTAAEISVRVPRGPAVEGGHVNMAFSQSNPPSELHKVHGSRNKPTSLWNPTYGSWFTEKPTKKNNPIAKKEPHDRGNLGLEGSCTVPPNVATGRLPGASLLLEPSSLTANMKEVPLFRLRHFPCGNVNYGYQQQGLPLEAATAPGAGHYEDTILKSKNSMNQPGP

SEQ ID NO: 60 - protein, 1518 aa, Homo sapiens
MALVLEIFTLLASICWVSANIFEYQVDAQPLRPCELQRETAFLKQADYVPQCAEDGSFQTVQCQNDGRSCWCVGANGSEVLGSRQPGRPVACLSFCQLQKQQILLSGYINSTDTSYLPQCQDSGDYAPVQCDVQQVQCWCVDAEGMEVYGTRQLGRPKRCPRSCEIRNRRLLHGVGDKSPPQCSAEGEFMPVQCKFVNTTDMMIFDLVHSYNRFPDAFVTFSSFQRRFPEVSGYCHCADSQGRELAETGLELLLDEIYDTIFAGLDLPSTFTETTLYRILQRRFLAVQSVISGRFRCPTKCEVERFTATSFGHPYVPSCRRNGDYQAVQCQTEGPCWCVDAQGKEMHGTRQQGEPPSCAEGQSCASERQQALSRLYFGTSGYFSQHDLFSSPEKRWASPRVARFATSCPPTIKELFVDSGLLRPMVEGQSQQFSVSENLLKEAIRAIFPSRGLARLALQFTTNPKRLQQNLFGGKFLVNVGQFNLSGALGTRGTFNFSQFFQQLGLASFLNGGRQEDLAKPLSVGLDSNSSTGTPEAAKKDGTMNKPTVGSFGFEINLQENQNALKFLASLLELPEFLLFLQHAISVPEDVARDLGDVMETVLSSQTCEQTPERLFVPSCTTEGSYEDVQCFSGECWCVNSWGKELPGSRVRGGQPRCPTDCEKQRARMQSLMGSQPAGSTLFVPACTSEGHFLPVQCFNSECYCVDAEGQAIPGTRSAIGKPKKCPTPCQLQSEQAFLRTVQALLSNSSMLPTLSDTYIPQCSTDGQWRQVQCNGPPEQVFELYQRWEAQNKGQDLTPAKLLVKIMSYREAASGNFSLFIQSLYEAGQQDVFPVLSQYPSLQDVPLAALEGKRPQPRENILLEPYLFWQILNGQLSQYPGSYSDFSTPLAHFDLRNCWCVDEAGQELEGMRSEPSKLPTLSPTPEPHLPLSLILSVVTSALVAALVLAFSGIMIVYRRKHQELQAMQMELQSPEYKLSKLRTSTIMTDYNPNYCFAGKTSSISDLKEVPRKNITLIRGLGHGAFGEVYEGQVSGMPNDPSPLQVAVKTLPEVCSEQDELDFLMEALIISKFNHQNIVRCIGVSLQSLPRFILLELMAGGDLKSFLRETRPRPSQPSSLAMLDLLHVARDIACGCQYLEENHFIHRDIAARNCLLTCPGPGRVAKIGDFGMARDIYRASYYRKGGCAMLPVKWMPPEAFMEGIFTSKTDTWSFGVLLWEIFSLGYMPYPSKSNQEVLEFVTSGGRMDPPKNCPGPVYRIMTQCWQHQPEDRPNFAIILERIEYCTQDPDVINTALPIEYGPLVEEEEKVPVRPKDPEGVPPLLVSQQAKREEERSPAAPPPLPTTSSGKAAKKPTAAEISVRVPRGPAVEGGHVNMAFSQSNPPSELHKVHGSRNKPTSLWNPTYGSWFTEKPTKKNNPIAKKEPHDRGNLGLEGSCTVPPNVATGRLPGASLLLEPSSLTANMKEVPLFRLRHFPCGNVNYGYQQQGLPLEAATAPGAGHYEDTILKSKNSMNQPGP

SEQ ID NO: 61 - protein, 1186 aa, Homo sapiens
MGTPASGRKRTPVKDRFSAEDEALSNIAREAEARLAAKRAARAEARDIRMRELERQQKEYSLHSFDRKWGQIQKWLEDSERARYSHRSSHHRPYLGVEDALSIRSVGSHRYDMFKDRSSRLSSLNHSYSHSHGMKKRSSDSHKDLLSGLYFDQRNYSSLRHSKPTSAYYTRQSSSLYSDPLATYKSDRASPTANSGLLRSASLASLYNGGLYNPYGPRTPSECSYYSSRISSARSSPGFTNDDTASIVSSDRASRGRRESVVSAADYFSRSNRRGSVVSEVDDISIPDLSSLDEKSDKQYAENYTRPSSRNSASATTPLSGNSSRRGSGDTSSLIDPDTSLSELRDIYDLKDQIQDVEGRYMQGLKELKESLSEVEEKYKKAMVSNAQLDNEKNNLIYQVDTLKDVIEEQEEQMAEFYRENEEKSKELERQKHMCSVLQHKMEELKEGLRQRDELIEEKQRMQQKIDTMTKEVFDLQETLLWKDKKIGALEKQKEYIACLRNERDMLREELADLQETVKTGEKHGLVIIPDGTPNGDVSHEPVAGAITVVSQEAAQVLESAGEGPLDVRLRKLAGEKEELLSQIRKLKLQLEEERQKCSRNDGTVGDLAGLQNGSDLQFIEMQMYRRKHQELQAMQMELQSPEYKLSKLRTSTIMTDYNPNYCFAGKTSSISDLKEVPRKNITLIRGLGHGAFGEVYEGQVSGMPNDPSPLQVAVKTLPEVCSEQDELDFLMEALIISKFNHQNIVRCIGVSLQSLPRFILLELMAGGDLKSFLRETRPRPSQPSSLAMLDLLHVARDIACGCQYLEENHFIHRDIAARNCLLTCPGPGRVAKIGDFGMARDIYRASYYRKGGCAMLPVKWMPPEAFMEGIFTSKTDTWSFGVLLWEIFSLGYMPYPSKSNQEVLEFVTSGGRMDPPKNCPGPVYRIMTQCWQHQPEDRPNFAIILERIEYCTQDPDVINTALPIEYGPLVEEEEKVPVRPKDPEGVPPLLVSQQAKREEERSPAAPPPLPTTSSGKAAKKPTAAEISVRVPRGPAVEGGHVNMAFSQSNPPSELHKVHGSRNKPTSLWNPTYGSWFTEKPTKKNNPIAKKEPHDRGNLGLEGSCTVPPNVATGRLPGASLLLEPSSLTANMKEVPLFRLRHFPCGNVNYGYQQQGLPLEAATAPGAGHYEDTILKSKNSMNQPGP

SEQ ID NO: 62 - protein, 1803 aa, Homo sapiens; identical to SEQ ID NO: 47

SEQ ID NO: 63 - protein, 873 aa, Homo sapiens
MNYQQQLANSAAIRAEIQRFESVHPNIYSIYELLERVEEPVLQNQIREHVIAIEDAFVNSQEWTLSRSVPELKVGIVGNLASGKSALVHRYLTGTYVQEESPEGGRFKKEIVVDGQSYLLLIRDEGGPPEAQFAMWVDAVIFVFSLEDEISFQTVYHYYSRMANYRNTSEIPLVLVGTQDAISSANPRVIDDARARKLSNDLKRCTYYETCATYGLNVERVFQDVMEGHGEVNIKHYLNCSHCEVDECHMDPESHKVICFCDHGTVLAEDGVSCIVSPTPEPHLPLSLILSVVTSALVAALVLAFSGIMIVYRRKHQELQAMQMELQSPEYKLSKLRTSTIMTDYNPNYCFAGKTSSISDLKEVPRKNITLIRGLGHGAFGEVYEGQVSGMPNDPSPLQVAVKTLPEVCSEQDELDFLMEALIISKFNHQNIVRCIGVSLQSLPRFILLELMAGGDLKSFLRETRPRPSQPSSLAMLDLLHVARDIACGCQYLEENHFIHRDIAARNCLLTCPGPGRVAKIGDFGMARDIYRASYYRKGGCAMLPVKWMPPEAFMEGIFTSKTDTWSFGVLLWEIFSLGYMPYPSKSNQEVLEFVTSGGRMDPPKNCPGPVYRIMTQCWQHQPEDRPNFAIILERIEYCTQDPDVINTALPIEYGPLVEEEEKVPVRPKDPEGVPPLLVSQQAKREEERSPAAPPPLPTTSSGKAAKKPTAAEISVRVPRGPAVEGGHVNMAFSQSNPPSELHKVHGSRNKPTSLWNPTYGSWFTEKPTKKNNPIAKKEPHDRGNLGLEGSCTVPPNVATGRLPGASLLLEPSSLTANMKEVPLFRLRHFPCGNVNYGYQQQGLPLEAATAPGAGHYEDTILKSKNSMNQPGP

SEQ ID NO: 64 - protein, 2224 aa, Homo sapiens
MGAIGLLWLLPLLLSTAAVGSGMGTGQRAGSPAAGPPLQPREPLSYSRLQRKSLAVDFVVPSLFRVYARDLLLPPSSSELKAGRPEARGSLALDCAPLLRLLGPAPGVSWTAGSPAPAEARTLSRVLKGGSVRKLRRAKQLVLELGEEAILEGCVGPPGEAAVGLLQFNLSELFSWWIRQGEGRLRIRLMPEKKASEVGREGRLSAAIRASQPRLLFQIFGTVLVSPYGLNGTLTGQAYKMSDPATRKLIEEWQYFYPMVLKKKEESKEEDELGYDDDFPVAVEVIVGGVRMVYPSAFVLISQNDIPVPQSVASAGGHIAVGQQGLGSVKDPSNCGMPLTPPTSPEQAILGESGGMQSAASHLVSQDGGMITMHSPKRSGKIPPKLHNHMVHRVWKECILNRTQSKRSQMSTPTLEEEPASNPATWDFVDPTQRVSCSCSRHKLLKRCAVGPNRPPTVSQPGFSAGPSSSSSLPPPASSKHKTAERQEKGDKLQKRPLIPFHHRPSVAEELCMEQDTPGQKLGLAGIDSSLEVSSSRKYDKQMAVPSRNTSKQMNLNPMDSPHSPISPLPPTLSPQPRGQETESLDPPSVPVNPALYGNGLELQQLSTLDDRTVLVGQRLPLMAEVSETALYCGIRPSNPESSEKWWHSYRLPPSDDAEFRPPELQGERCDAKMEVNSESTALQRLLAQPNKRFKIWQDKQPQLQPLHFLDPLPLSQQPGDSLGEVNDPYTFEDGDIKYIFTANKKCKQGTEKDSLKKNKSEDGFGTKDVTTPGHSTPVPDGKNAMSIFSSATKTDVRQDNAAGRAGSSSLTQVTDLAPSLHDLDNIFDNSDDDELGAVSPALRSSKMPAVGTEDRPLGKDGRAAVPYPPTVADLQRMFPTPPSLEQHPAFSPVMNYKDGISSETVTALGMMESPMVSMVSTQLTEFKMEVEDGLGSPKPEEIKDFSYVHKVPSFQPFVGSSMFAPLKMLPSHCLLPLKIPDACLFRPSWAIPPKIEQLPMPPAATFIRDGYNNVPSVGSLADPDYLNTPQMNTPVTLNSAAPASNSGAGVLPSPATPRFSVPTPRTPRTPRTPRGGGTASGQGSVKYDSTDQGSPASTPSTTRPLNSVEPATMQPIPEAHSLYVTLILSDSVMNIFKDRNFDSCCICACNMNIKGADVGLYIPDSSNEDQYRCTCGFSAIMNRKLGYNSGLFLEDELDIFGKNSDIGQAAERRLMMCQSTFLPQVEGTKKPQEPPISLLLLLQNQHTQPFASLNFLDYISSNNRQTLPCVSWSYDRVQADNNDYWTECFNALEQGRQYVDNPTGGKVDEALVRSATVHSWPHSNVLDISMLSSQDVVRMLLSLQPFLQDAIQKKRTGRTWENIQHVQGPLTWQQFHKMAGRGTYGSEESPEPLPIPTLLVGYDKDFLTISPFSLPFWERLLLDPYGGHRDVAYIVVCPENEALLEGAKTFFRDLSAVYEMCRLGQHKPICKVLRDGIMRVGKTVAQKLTDELVSEWFNQPWSGEENDNHSRLKLYAQVCRHHLAPYLATLQLDSSLLIPPKYQTPPAAAQGQATPGNAGPLAPNGSAAPPAGSAFNPTSNSSSTNPAASSSASGSSVPPVSSSASAPGISQISTTSSSGFSGSVGGQNPSTGGISADRTQGNIGCGGDTDPGQSSSQPSQDGQESVTERERIGIPTEPDSADSHAHPPAVVIYMVDPFTYAAEEDSTSGNFWLLSLMRCYTEMLDNLPEHMRNSFILQIVPCQYMLQTMKDEQVFYIQYLKSMAFSVYCQCRRPLPTQIHIKSLTGFGPAASIEMTLKNPERPSPIQLYSPPFILAPIKDKQTELGETFGEASQKYNVLFVGYCLSHDQRWLLASCTDLHGELLETCVVNIALPNRSRRSKVSARKIGLQKLWEWCIGIVQMTSLPWRVVIGRLGRLGHGELKDWSILLGECSLQTISKKLKDVCRMCGISAADSPSILSACLVAMEPQGSFVVMPDAVTMGSVFGRSTALNMQSSQLNTPQDASCTHILVFPTSSTIQVAPANYPNEDGFSPNNDDMFVDLPFPDDMDNDIGILMTGNLHSSPNSSPVPSPGSPSGIGVGSHFQHSRSQGERLLSREAPEELKQQPLALGYFVSTAKAENLPQWFWSSCPQAQNQCPLFLKASLHHHISVAQTDELLPARNSQRVPHPLDSKTTSDVLRFVLEQYNALSWLTCNPATQDRTSCLPVHFVVLTQLYNAIMNIL

SEQ ID NO: 65 - protein, 1487 aa, Homo sapiens
MGAIGLLWLLPLLLSTAAVGSGMGTGQRAGSPAAGPPLQPREPLSYSRLQRKSLAVDFVVPSLFRVYARDLLLPPSSSELKAGRPEARGSLALDCAPLLRLLGPAPGVSWTAGSPAPAEARTLSRVLKGGSVRKLRRAKQLVLELGEEAILEGCVGPPGEAAVGLLQFNLSELFSWWIRQGEGRLRIRLMPEKKASEVGREGRLSAAIRASQPRLLFQIFGTGHSSLESPTNMPSPSPDYFTWNLTWIMKDSFPFLSHRSRYGLECSFDFPCELEYSPPLHDLRNQSWSWRRIPSEEASQMDLLDGPGAERSKEMPRGSFLLLNTSADSKHTILSPWMRSSSEHCTLAVSVHRHLQPSGRYIAQLLPHNEAAREILLMPTPGKHGWTVLQGRIGRPDNPFRVALEYISSGNRSLSAVDFFALKNCSEGTSPGSKMALQSSFTCWNGTVLQLGQACDFHQDCAQGEDESQMCRKLPVGFYCNFEDGFCGWTQGTLSPHTPQWQVRTLKDARFQDHQDHALLLSTTDVPASESATVTSATFPAPIKSSPCELRMSWLIRGVLRGNVSLVLVENKTGKEQGRMVWHVAAYEGLSLWQWMVLPLLDVSDRFWLQMVAWWGQGSRAIVAFDNISISLDCYLTISGEDKILQNTAPKSRNLFERNPNKELKPGENSPRQTPIFDPTVHWLFTTCGASGPHGPTQAQCNNAYQNSNLSVEVGSEGPLKGIQIWKVPATDTYSISGYGAAGGKGGKNTMMRSHGVSVLGIFNLEKDDMLYILVGQQGEDACPSTNQLIQKVCIGENNVIEEEIRVNRSVHEWAGGGGGGGGATYVFKMKDGVPVPLIIAAGGGGRAYGAKTDTFHPERLENNSSVLGLNGNSGAAGGGGGWNDNTSLLWAGKSLQEGATGGHSCPQAMKKWGWETRGGFGGGGGGCSSGGGGGGYIGGNAASNNDPEMDGEDGVSFISPLGILYTPALKVPDVEVKGECSSYYLLLQGNGNRRCKATLIHSANQINGSFALNLIHGKMKTKTEEAKLSFPFDLLSLPHFSGEQIVQREKQLANVQVLALEECLKRRKLAKQPETVSVAELKSLLVLTRKHFLDYFDAVIPKMILRKMDKIKTFNILNDFSPVEPNSSSLMETNPLEWPERHVLQNLETFEKTKQKMRTGSLPHSSEQLLGHKEGPRDSITLLDAKELLKYFTSDGLPIGDLQPLPIQKGEKTFVLTPELSPGKLQVLPFEKASVCHYHGIEYCLDDRKALERDGGFSELQSRLIRYETQTTCTRESFPVPTVLSPLPSPVVSSDPGSVPDGEVLQNELRTEVSRLKRRSKDLNCLYPRKRLVKSESSESLLSQTTGNSNHYHHHVTSRKPQTERSLPVTCPLVPIPSCETPKLATKTSSGQKSMHESKTSRQIKESRSQKHTRILKEVVTETLKKHSITETHECFTACSQRLFEISKFYLKDLKTSRGLFEEMKKTANNNAVQVIDWVLEKTSKK

SEQ ID NO: 66 - skipped

SEQ ID NO: 67 - protein, 1425 aa, Homo sapiens
MGAIGLLWLLPLLLSTAAVGSGMGTGQRAGSPAAGPPLQPREPLSYSRLQRKSLAVDFVVPSLFRVYARDLLLPPSSSELKAGRPEARGSLALDCAPLLRLLGPAPGVSWTAGSPAPAEARTLSRVLKGGSVRKLRRAKQLVLELGEEAILEGCVGPPGEAAVGLLQFNLSELFSWWIRQGEGRLRIRLMPEKKASEVGREGRLSAAIRASQPRLLFQIFGTGHSSLESPTNMPSPSPDYFTWNLTWIMKDSFPFLSHRSRYGLECSFDFPCELEYSPPLHDLRNQSWSWRRIPSEEASQMDLLDGPGAERSKEMPRGSFLLLNTSADSKHTILSPWMRSSSEHCTLAVSVHRHLQPSGRYIAQLLPHNEAAREILLMPTPGKHGWTVLQGRIGRPDNPFRVALEYISSGNRSLSAVDFFALKNCSEGTSPGSKMALQSSFTCWNGTVLQLGQACDFHQDCAQGEDESQMCRKLPVGFYCNFEDGFCGWTQGTLSPHTPQWQVRTLKDARFQDHQDHALLLSTTDVPASESATVTSATFPAPIKSSPCELRMSWLIRGVLRGNVSLVLVENKTGKEQGRMVWHVAAYEGLSLWQWMVLPLLDVSDRFWLQMVAWWGQGSRAIVAFDNISISLDCYLTISGEDKILQNTAPKSRNLFERNPNKELKPGENSPRQTPIFDPTVHWLFTTCGASGPHGPTQAQCNNAYQNSNLSVEVGSEGPLKGIQIWKVPATDTYSISGYGAAGGKGGKNTMMRSHGVSVLGIFNLEKDDMLYILVGQQGEDACPSTNQLIQKVCIGENNVIEEEIRVNRSVHEWAGGGGGGGGATYVFKMKDGVPVPLIIAAGGGGRAYGAKTDTFHPERLENNSSVLGLNGNSGAAGGGGGWNDNTSLLWAGKSLQEGATGGHSCPQAMKKWGWETRGGFGGGGGGCSSGGGGGGYIGGNAASNNDPEMDGEDGVSFISPLGILYTPALKVMEGHGEVNIKHYLNCSHCEVDECHMDPESHKVICFCDHGTVLAEDGVSCIALTAYTYLTIFDLFSLMTCLISYWVTLRKPSPVYSFGFERLEVLAVFASTVLAQLGALFILKESAERFLEQPEIHTGRLLVGTFVALCFNLFTMLSIRNKPFAYVSEAASTSWLQEHVADLSRSLCGIIPGLSSIFLPRMNPFVLIDLAGAFALCITYMLIEINNYFAVDTASAIAIALMTFGTMYPMSVYSGKVLLQTTPPHVIGQLDKLIREVSTLDGVLEVRNEHFWTLGFGSLAGSVHVRIRRDANEQMVLAHVTNRLYTLVSTLTVQIFKDDWIRPALLSGPVAANVLNFSDHHVIPMPLLKGTDDLNPVTSTPAKPSSPPPEFSFNTPGKNVNPVILLNTQTRPYGFGLNHGHTPYSSMLNQGLGVPGIGATQGLRTGFTNIPSRYGTNNRIGQPRP

SEQ ID NO: 68 - protein, 1620 aa, Homo sapiens
MGAIGLLWLLPLLLSTAAVGSGMGTGQRAGSPAAGPPLQPREPLSYSRLQRKSLAVDFVVPSLFRVYARDLLLPPSSSELKAGRPEARGSLALDCAPLLRLLGPAPGVSWTAGSPAPAEARTLSRVLKGGSVRKLRRAKQLVLELGEEAILEGCVGPPGEAAVGLLQFNLSELFSWWIRQGEGRLRIRLMPEKKASEVGREGRLSAAIRASQPRLLFQIFGTGHSSLESPTNMPSPSPDYFTWNLTWIMKDSFPFLSHRSRYGLECSFDFPCELEYSPPLHDLRNQSWSWRRIPSEEASQMDLLDGPGAERSKEMPRGSFLLLNTSADSKHTILSPWMRSSSEHCTLAVSVHRHLQPSGRYIAQLLPHNEAAREILLMPTPGKHGWTVLQGRIGRPDNPFRVALEYISSGNRSLSAVDFFALKNCSEGTSPGSKMALQSSFTCWNGTVLQLGQACDFHQDCAQGEDESQMCRKLPVGFYCNFEDGFCGWTQGTLSPHTPQWQVRTLKDARFQDHQDHALLLSTTDVPASESATVTSATFPAPIKSSPCELRMSWLIRGVLRGNVSLVLVENKTGKEQGRMVWHVAAYEGLSLWQWMVLPLLDVSDRFWLQMVAWWGQGSRAIVAFDNISISLDCYLTISGEDKILQNTAPKSRNLFERNPNKELKPGENSPRQTPIFDPTVHWLFTTCGASGPHGPTQAQCNNAYQNSNLSVEVGSEGPLKGIQIWKVPATDTYSISGYGAAGGKGGKNTMMRSHGVSVLGIFNLEKDDMLYILVGQQGEDACPSTNQLIQKVCIGENNVIEEEIRVNRSVHEWAGGGGGGGGATYVFKMKDGVPVPLIIAAGGGGRAYGAKTDTFHPERLENNSSVLGLNGNSGAAGGGGGWNDNTSLLWAGKSLQEGATGGHSCPQAMKKWGWETRGGFGGGGGGCSSGGGGGGYIGGNAASNNDPEMDGEDGVSFISPLGILYTPALKVMEGHGEVNIKHYLNCSHCEVDECHMDPESHKVICFCDHGTVLAEDGVSCIVSPTPEPHLPLSLILSVVTSALVAALVLAFSGIMIVYRRKHQELQAMQMELQSPEYKLSKLRTSTIMTDYNPNYCFAGKTSSISDLKEVPRKNITLIRGLGHGAFGEVYEGQVSGMPNDPSPLQVAVKTLPEVCSEQDELDFLMEALIISKFNHQNIVRCIGVSLQSLPRFILLELMAGGDLKSFLRETRPRPSQPSSLAMLDLLHVARDIACGCQYLEENHFIHRDIAARNCLLTCPGPGRVAKIGDFGMARDIYRASYYRKGGCAMLPVKWMPPEAFMEGIFTSKTDTWSFGVLLWEIFSLGYMPYPSKSNQEVLEFVTSGGRMDPPKNCPGPVINVMKQLIGSSNLFVMQVEMDIYTALKKWMFLQLVPSWNGSLKQLLTETDVWFSKQRKDFEGMAFLETEQGKPFVSVFRHLRLQYIISDLASARIIEQDAVVPSEWLSSVYKQQWFAMLRAEQDSEVGPQEINKEELEGNSMRCGRKLAKDGEYCWRWTGFNFGFDLLVTYTNRYIIFKRNTLNQPCSGSVSLQPRRSIAFRLRLASFDSSGKLICSRTTGYQILTLEKDQEQVVMNLDSRLLIFPLYICCNFLYISPEKKN

SEQ ID NO: 69 - protein, 1637 aa, Homo sapiens
MGAIGLLWLLPLLLSTAAVGSGMGTGQRAGSPAAGPPLQPREPLSYSRLQRKSLAVDFVVPSLFRVYARDLLLPPSSSELKAGRPEARGSLALDCAPLLRLLGPAPGVSWTAGSPAPAEARTLSRVLKGGSVRKLRRAKQLVLELGEEAILEGCVGPPGEAAVGLLQFNLSELFSWWIRQGEGRLRIRLMPEKKASEVGREGRLSAAIRASQPRLLFQIFGTGHSSLESPTNMPSPSPDYFTWNLTWIMKDSFPFLSHRSRYGLECSFDFPCELEYSPPLHDLRNQSWSWRRIPSEEASQMDLLDGPGAERSKEMPRGSFLLLNTSADSKHTILSPWMRSSSEHCTLAVSVHRHLQPSGRYIAQLLPHNEAAREILLMPTPGKHGWTVLQGRIGRPDNPFRVALEYISSGNRSLSAVDFFALKNCSEGTSPGSKMALQSSFTCWNGTVLQLGQACDFHQDCAQGEDESQMCRKLPVGFYCNFEDGFCGWTQGTLSPHTPQWQVRTLKDARFQDHQDHALLLSTTDVPASESATVTSATFPAPIKSSPCELRMSWLIRGVLRGNVSLVLVENKTGKEQGRMVWHVAAYEGLSLWQWMVLPLLDVSDRFWLQMVAWWGQGSRAIVAFDNISISLDCYLTISGEDKILQNTAPKSRNLFERNPNKELKPGENSPRQTPIFDPTVHWLFTTCGASGPHGPTQAQCNNAYQNSNLSVEVGSEGPLKGIQIWKVPATDTYSISGYGAAGGKGGKNTMMRSHGVSVLGIFNLEKDDMLYILVGQQGEDACPSTNQLIQKVCIGENNVIEEEIRVNRSVHEWAGGGGGGGGATYVFKMKDGVPVPLIIAAGGGGRAYGAKTDTFHPERLENNSSVLGLNGNSGAAGGGGGWNDNTSLLWAGKSLQEGATGGHSCPQAMKKWGWETRGGFGGGGGGCSSGGGGGGYIGGNAASNNDPEMDGEDGVSFISPLGILYTPALKVMEGHGEVNIKHYLNCSHCEVDECHMDPESHKVICFCDHGTVLAEDGVSCIVSPTPEPHLPLSLILSVVTSALVAALVLAFSGIMIVAQKIVATRKKQQLSIGPCKSLPNSPSHSSVCSAQVSAVHISQTSNGGGSLSDYSSSVPSTPSTSQKELRIDVPPTANTPTPVRKQSKRRSNLFTSRKGSDPDKEKKGLESRADSIGSGRAIPIKQGMLLKRSGKSLNKEWKKKYVTLCDNGVLTYHPSLHDYMQNVHGKEIDLLRTTVKVPGKRPPRATSACAPISSPKTNGLSKDMSSLHISPNSDTGLGDSVCSSPSISSTTSPKLDPPPSPHANRKKHRRKKSTSNFKADGLSGTAEEQEENFEFIIVSLTGQTWHFEATTYEERDAWVQAIESQILASLQSCESSKNKSRLTSQSEAMALQSIRNMRGNSHCVDCETQNPNWASLNLGALMCIECSGIHRNLGTHLSRVRSLDLDDWPVELIKVMSSIGNELANSVWEESSQGRTKPSVDSTREEKERWIRAKYEQKLFLAPLPCTELSLGQHLLRATADEDLRTAILLLAHGSRDEVNETCGEGDGRTALHLACRKGNVVLAQLLIWYGVDVTARDAHGNTALAYARQASSQECIDVLLQYGCPDERFVLMATPNLSRRNNNRNNSSGRVPTII

SEQ ID NO: 70 - protein, 1496 aa, Homo sapiens
MGAIGLLWLLPLLLSTAAVGSGMGTGQRAGSPAAGPPLQPREPLSYSRLQRKSLAVDFVVPSLFRVYARDLLLPPSSSELKAGRPEARGSLALDCAPLLRLLGPAPGVSWTAGSPAPAEARTLSRVLKGGSVRKLRRAKQLVLELGEEAILEGCVGPPGEAAVGLLQFNLSELFSWWIRQGEGRLRIRLMPEKKASEVGREGRLSAAIRASQPRLLFQIFGTGHSSLESPTNMPSPSPDYFTWNLTWIMKDSFPFLSHRSRYGLECSFDFPCELEYSPPLHDLRNQSWSWRRIPSEEASQMDLLDGPGAERSKEMPRGSFLLLNTSADSKHTILSPWMRSSSEHCTLAVSVHRHLQPSGRYIAQLLPHNEAAREILLMPTPGKHGWTVLQGRIGRPDNPFRVALEYISSGNRSLSAVDFFALKNCSEGTSPGSKMALQSSFTCWNGTVLQLGQACDFHQDCAQGEDESQMCRKLPVGFYCNFEDGFCGWTQGTLSPHTPQWQVRTLKDARFQDHQDHALLLSTTDVPASESATVTSATFPAPIKSSPCELRMSWLIRGVLRGNVSLVLVENKTGKEQGRMVWHVAAYEGLSLWQWMVLPLLDVSDRFWLQMVAWWGQGSRAIVAFDNISISLDCYLTISGEDKILQNTAPKSRNLFERNPNKELKPGENSPRQTPIFDPTVHWLFTTCGASGPHGPTQAQCNNAYQNSNLSVEVGSEGPLKGIQIWKVPATDTYSISGYGAAGGKGGKNTMMRSHGVSVLGIFNLEKDDMLYILVGQQGEDACPSTNQLIQKVCIGENNVIEEEIRVNRSVHEWAGGGGGGGGATYVFKMKDGVPVPLIIAAGGGGRAYGAKTDTFHPERLENNSSVLGLNGNSGAAGGGGGWNDNTSLLWAGKSLQEGATGGHSCPQAMKKWGWETRGGFGGGGGGCSSGGGGGGYIGGNAASNNDPEMDGEDGVSFISPLGILYTPALKVMEGHGEVNIKHYLNCSHCEVDECHMDPESHKVICFCDHGTVLAEDGVSCIVSPTPEPHLPLSLILSVVTSALVAALVLAFSGIMIDWMTMPASKKSTVKAEIPEEELDQWTIKERFSSSSHWKCASLLEWQCGGQEISLQRVVLTHPNTPSQECDESGSTMSSSLHSDQSQGFQPSKNAFECSECGKVFSKSSTLNKHQKIHNEKNANQKIHIKEKRYECRECGKAFHQSTHLIHHQRIHTGEKPYECKECGKAFSVSSSLTYHQKIHTGEKPFECNLCGKAFIRNIHLAHHHRIHTGEKPFKCNICEKAFVCRAHLTKHQNIHSGEKPYKCNECGKAFNQSTSFLQHQRIHTGEKPFECNECGKAFRVNSSLTEHQRIHTGEKPYKCNECGKAFRDNSSFARHRKIHTGEKPYRCGLCEKAFRDQSALAQHQRIHTGEKPYTCNICEKAFSDHSALTQHKRIHTREKPYKCKICEKAFIRSTHLTQHQRIHTGEKPYKCNKCGKAFNQTANLIQHQRHHIGEK

SEQ ID NO: 71 - protein, 869 aa, Homo sapiens
MEQSPPPAPEPTQGPTPARSRRRREPESPPASAPTNQLIQKVCIGENNVIEEEIRVNRSVHEWAGGGGGGGGATYVFKMKDGVPVPLIIAAGGGGRAYGAKTDTFHPERLENNSSVLGLNGNSGAAGGGGGWNDNTSLLWAGKSLQEGATGGHSCPQAMKKWGWETRGGFGGGGGGCSSGGGGGGYIGGNAASNNDPEMDGEDGVSFISPLGILYTPALKVMEGHGEVNIKHYLNCSHCEVDECHMDPESHKVICFCDHGTVLAEDGVSCIVSPTPEPHLPLSLILSVVTSALVAALVLAFSGIMIVYRRKHQELQAMQMELQSPEYKLSKLRTSTIMTDYNPNYCFAGKTSSISDLKEVPRKNITLIRGLGHGAFGEVYEGQVSGMPNDPSPLQVAVKTLPEVCSEQDELDFLMEALIISKFNHQNIVRCIGVSLQSLPRFILLELMAGGDLKSFLRETRPRPSQPSSLAMLDLLHVARDIACGCQYLEENHFIHRDIAARNCLLTCPGPGRVAKIGDFGMARDIYRASYYRKGGCAMLPVKWMPPEAFMEGIFTSKTDTWSFGVLLWEIFSLGYMPYPSKSNQEVLEFVTSGGRMDPPKNCPGPVYRIMTQCWQHQPEDRPNFAIILERIEYCTQDPDVINTALPIEYGPLVEEEEKVPVRPKDPEGVPPLLVSQQAKREEERSPAAPPPLPTTSSGKAAKKPTAAEISVRVPRGPAVEGGHVNMAFSQSNPPSELHKVHGSRNKPTSLWNPTYGSWFTEKPTKKNNPIAKKEPHDRGNLGLEGSCTVPPNVATGRLPGASLLLEPSSLTANMKEVPLFRLRHFPCGNVNYGYQQQGLPLEAATAPGAGHYEDTILKSKNSMNQPGP

SEQ ID NO: 72 - protein, 846 aa, Homo sapiens
MESARENIDLQTNQLIQKVCIGENNVIEEEIRVNRSVHEWAGGGGGGGGATYVFKMKDGVPVPLIIAAGGGGRAYGAKTDTFHPERLENNSSVLGLNGNSGAAGGGGGWNDNTSLLWAGKSLQEGATGGHSCPQAMKKWGWETRGGFGGGGGGCSSGGGGGGYIGGNAASNNDPEMDGEDGVSFISPLGILYTPALKVMEGHGEVNIKHYLNCSHCEVDECHMDPESHKVICFCDHGTVLAEDGVSCIVSPTPEPHLPLSLILSVVTSALVAALVLAFSGIMIVYRRKHQELQAMQMELQSPEYKLSKLRTSTIMTDYNPNYCFAGKTSSISDLKEVPRKNITLIRGLGHGAFGEVYEGQVSGMPNDPSPLQVAVKTLPEVCSEQDELDFLMEALIISKFNHQNIVRCIGVSLQSLPRFILLELMAGGDLKSFLRETRPRPSQPSSLAMLDLLHVARDIACGCQYLEENHFIHRDIAARNCLLTCPGPGRVAKIGDFGMARDIYRASYYRKGGCAMLPVKWMPPEAFMEGIFTSKTDTWSFGVLLWEIFSLGYMPYPSKSNQEVLEFVTSGGRMDPPKNCPGPVYRIMTQCWQHQPEDRPNFAIILERIEYCTQDPDVINTALPIEYGPLVEEEEKVPVRPKDPEGVPPLLVSQQAKREEERSPAAPPPLPTTSSGKAAKKPTAAEISVRVPRGPAVEGGHVNMAFSQSNPPSELHKVHGSRNKPTSLWNPTYGSWFTEKPTKKNNPIAKKEPHDRGNLGLEGSCTVPPNVATGRLPGASLLLEPSSLTANMKEVPLFRLRHFPCGNVNYGYQQQGLPLEAATAPGAGHYEDTILKSKNSMNQPGP

SEQ ID NO: 73 - protein, 3990 aa, Homo sapiens
MAKYGEHEASPDNGQNEFSDIIKSRSDEHNDVQKKTFTKWINARFSKSGKPPINDMFTDLKDGRKLLDLLEGLTGTSLPKERGSTRVHALNNVNRVLQVLHQNNVELVNIGGTDIVDGNHKLTLGLLWSIILHWQVKDVMKDVMSDLQQTNSEKILLSWVRQTTRPYSQVNVLNFTTSWTDGLAFNAVLHRHKPDLFSWDKVVKMSPIERLEHAFSKAQTYLGIEKLLDPEDVAVQLPDKKSIIMYLTSLFEVLPQQVTIDAIREVETLPRKYKKECEEEAINIQSTAPEEEHESPRAETPSTVTEVDMDLDSYQIALEEVLTWLLSAEDTFQEQDDISDDVEEVKDQFATHEAFMMELTAHQSSVGSVLQAGNQLITQGTLSDEEEFEIQEQMTLLNARWEALRVESMDRQSRLHDVLMELQKKQLQQLSAWLTLTEERIQKMETCPLDDDVKSLQKLLEEHKSLQSDLEAEQVKVNSLTHMVVIVDENSGESATAILEDQLQKLGERWTAVCRWTEERWNRLQEINILWQELLEEQCLLKAWLTEKEEALNKVQTSNFKDQKELSVSVRRLAILKEDMEMKRQTLDQLSEIGQDVGQLLDNSKASKKINSDSEELTQRWDSLVQRLEDSSNQVTQAVAKLGMSQIPQKDLLETVRVREQAITKKSKQELPPPPPPKKRQIHVDIEAKKKFDAISAELLNWILKWKTAIQTTEIKEYMKMQDTSEMKKKLKALEKEQRERIPRADELNQTGQILVEQMGKEGLPTEEIKNVLEKVSSEWKNVSQHLEDLERKIQLQEDINAYFKQLDELEKVIKTKEEWVKHTSISESSRQSLPSLKDSCQRELTNLLGLHPKIEMARASCSALMSQPSAPDFVQRGFDSFLGRYQAVQEAVEDRQQHLENELKGQPGHAYLETLKTLKDVLNDSENKAQVSLNVLNDLAKVEKALQEKKTLDEILENQKPALHKLAEETKALEKNVHPDVEKLYKQEFDDVQGKWNKLKVLVSKDLHLLEEIALTLRAFEADSTVIEKWMDGVKDFLMKQQAAQGDDAGLQRQLDQCSAFVNEIETIESSLKNMKEIETNLRSGPVAGIKTWVQTRLGDYQTQLEKLSKEIATQKSRLSESQEKAANLKKDLAEMQEWMTQAEEEYLERDFEYKSPEELESAVEEMKRAKEDVLQKEVRVKILKDNIKLLAAKVPSGGQELTSELNVVLENYQLLCNRIRGKCHTLEEVWSCWIELLHYLDLETTWLNTLEERMKSTEVLPEKTDAVNEALESLESVLRHPADNRTQIRELGQTLIDGGILDDIISEKLEAFNSRYEDLSHLAESKQISLEKQLQVLRETDQMLQVLQESLGELDKQLTTYLTDRIDAFQVPQEAQKIQAEISAHELTLEELRRNMRSQPLTSPESRTARGGSQMDVLQRKLREVSTKFQLFQKPANFEQRMLDCKRVLDGVKAELHVLDVKDVDPDVIQTHLDKCMKLYKTLSEVKLEVETVIKTGRHIVQKQQTDNPKGMDEQLTSLKVLYNDLGAQVTEGKQDLERASQLARKMKKEAASLSEWLSATETELVQKSTSEGLLGDLDTEISWAKNVLKDLEKRKADLNTITESSAALQNLIEGSEPILEERLCVLNAGWSRVRTWTEDWCNTLMNHQNQLEIFDGNVAHISTWLYQAEALLDEIEKKPTSKQEEIVKRLVSELDDANLQVENVRDQALILMNARGSSSRELVEPKLAELNRNFEKVSQHIKSAKLLIAQEPLYQCLVTTETFETGVPFSDLEKLENDIENMLKFVEKHLESSDEDEKMDEESAQIEEVLQRGEEMLHQPMEDNKKEKIRLQLLLLHTRYNKIKAIPIQQRKMGQLASGIRSSLLPTDYLVEINKILLCMDDVELSLNVPELNTAIYEDFSFQEDSLKNIKDQLDKLGEQIAVIHEKQPDVILEASGPEAIQIRDTLTQLNAKWDRINRMYSDRKGCFDRAMEEWRQFHCDLNDLTQWITEAEELLVDTCAPGGSLDLEKARIHQQELEVGISSHQPSFAALNRTGDGIVQKLSQADGSFLKEKLAGLNQRWDAIVAEVKDRQPRLKGESKQVMKYRHQLDEIICWLTKAEHAMQKRSTTELGENLQELRDLTQEMEVHAEKLKWLNRTELEMLSDKSLSLPERDKISESLRTVNMTWNKICREVPTTLKECIQEPSSVSQTRIAAHPNVQKVVLVSSASDIPVQSHRTSEISIPADLDKTITELADWLVLIDQMLKSNIVTVGDVEEINKTVSRMKITKADLEQRHPQLDYVFTLAQNLKNKASSSDMRTAITEKLERVKNQWDGTQHGVELRQQQLEDMIIDSLQWDDHREETEELMRKYEARLYILQQARRDPLTKQISDNQILLQELGPGDGIVMAFDNVLQKLLEEYGSDDTRNVKETTEYLKTSWINLKQSIADRQNALEAEWRTVQASRRDLENFLKWIQEAETTVNVLVDASHRENALQDSILARELKQQMQDIQAEIDAHNDIFKSIDGNRQKMVKALGNSEEATMLQHRLDDMNQRWNDLKAKSASIRAHLEASAEKWNRLLMSLEELIKWLNMKDEELKKQMPIGGDVPALQLQYDHCKALRRELKEKEYSVLNAVDQARVFLADQPIEAPEEPRRNLQSKTELTPEERAQKIAKAMRKQSSEVKEKWESLNAVTSNWQKQVDKALEKLRDLQGAMDDLDADMKEAESVRNGWKPVGDLLIDSLQDHIEKIMAFREEIAPINFKVKTVNDLSSQLSPLDLHPSLKMSRQLDDLNMRWKLLQVSVDDRLKQLQEAHRDFGPSSQHFLSTSVQLPWQRSISHNKVPYYINHQTQTTCWDHPKMTELFQSLADLNNVRFSAYRTAIKIRRLQKALCLDLLELSTTNEIFKQHKLNQNDQLLSVPDVINCLTTTYDGLEQMHKDLVNVPLCVDMCLNWLLNVYDTGRTGKIRVQSLKIGLMSLSKGLLEEKYRYLFKEVAGPTEMCDQRQLGLLLHDAIQIPRQLGEVAAFGGSNIEPSVRSCFQQNNNKPEISVKEFIDWMHLEPQSMVWLPVLHRVAAAETAKHQAKCNICKECPIVGFRYRSLKHFNYDVCQSCFFSGRTAKGHKLHYPMVEYCIPTTSGEDVRDFTKVLKNKFRSKKYFAKHPRLGYLPVQTVLEGDNLETPITLISMWPEHYDPSQSPQLFHDDTHSRIEQYATRLAQMERTNGSFLTDSSSTTGSVEDEHALIQQYCQTLGGESPVSQPQSPAQILKSVEREERGELERIIADLEEEQRNLQVEYEQLKDQHLRRGLPVGSPPESIISPHHTSEDSELIAEAKLLRQHKGRLEARMQILEDHNKQLESQLHRLRQLLEQPESDSRINGVSPWASPQHSALSYSLDPDASGPQFHQAVSPTPEPHLPLSLILSVVTSALVAALVLAFSGIMIVYRRKHQELQAMQMELQSPEYKLSKLRTSTIMTDYNPNYCFAGKTSSISDLKEVPRKNITLIRGLGHGAFGEVYEGQVSGMPNDPSPLQVAVKTLPEVCSEQDELDFLMEALIISKFNHQNIVRCIGVSLQSLPRFILLELMAGGDLKSFLRETRPRPSQPSSLAMLDLLHVARDIACGCQYLEENHFIHRDIAARNCLLTCPGPGRVAKIGDFGMARDIYRASYYRKGGCAMLPVKWMPPEAFMEGIFTSKTDTWSFGVLLWEIFSLGYMPYPSKSNQEVLEFVTSGGRMDPPKNCPGPVYRIMTQCWQHQPEDRPNFAIILERIEYCTQDPDVINTALPIEYGPLVEEEEKVPVRPKDPEGVPPLLVSQQAKREEERSPAAPPPLPTTSSGKAAKKPTAAEISVRVPRGPAVEGGHVNMAFSQSNPPSELHKVHGSRNKPTSLWNPTYGSWFTEKPTKKNNPIAKKEPHDRGNLGLEGSCTVPPNVATGRLPGASLLLEPSSLTANMKEVPLFRLRHFPCGNVNYGYQQQGLPLEAATAPGAGHYEDTILKSKNSMNQPGP

SEQ ID NO: 74 - protein, 807 aa, Homo sapiens
MVDYHAANQSYQYGPSSAGNGAGGGGSMGDYMAQEDDWDRDLLLDPAWEKQQRKTFTAWCNSHLRKAGTQIENIDEDFRDGLKLMLLLEVISGERLPKPERGKMRVHKINNVNKALDFIASKGVKLVSIGAEEIVDGNAKMTLGMIWTIILRFAIQDISVEETSAKEGLLLWCQRKTAPYKNVNVQNFHISWKDGLAFNALIHRHRPELIEYDKLRKDDPVTNLNNAFEVAEKYLDIPKMLDAEVYRRKHQELQAMQMELQSPEYKLSKLRTSTIMTDYNPNYCFAGKTSSISDLKEVPRKNITLIRGLGHGAFGEVYEGQVSGMPNDPSPLQVAVKTLPEVCSEQDELDFLMEALIISKFNHQNIVRCIGVSLQSLPRFILLELMAGGDLKSFLRETRPRPSQPSSLAMLDLLHVARDIACGCQYLEENHFIHRDIAARNCLLTCPGPGRVAKIGDFGMARDIYRASYYRKGGCAMLPVKWMPPEAFMEGIFTSKTDTWSFGVLLWEIFSLGYMPYPSKSNQEVLEFVTSGGRMDPPKNCPGPVYRIMTQCWQHQPEDRPNFAIILERIEYCTQDPDVINTALPIEYGPLVEEEEKVPVRPKDPEGVPPLLVSQQAKREEERSPAAPPPLPTTSSGKAAKKPTAAEISVRVPRGPAVEGGHVNMAFSQSNPPSELHKVHGSRNKPTSLWNPTYGSWFTEKPTKKNNPIAKKEPHDRGNLGLEGSCTVPPNVATGRLPGASLLLEPSSLTANMKEVPLFRLRHFPCGNVNYGYQQQGLPLEAATAPGAGHYEDTILKSKNSMNQPGP

SEQ ID NO: 75 - protein, 789 aa, Homo sapiens
MGRPESAGGGSRGPFEGGGRARRAGGIFLTLSILRTRDLPSGAMSEGVDLIDIYADEEFNQDPEFNNTDQIDLYDDVLTATSQPSDDRSSSTEPPPPVRQEPSPKPNNKTPAILYTYSGLRNRRAAVYVGSFSWWTTDQQLIQVIRSIGVYDVVELKFAENRANGQSKGYAEVVVASENSVHKLLELLPGKVLNGEKVDVRPATRQNLSQFEAQARKRECVRVPRGVYRRKHQELQAMQMELQSPEYKLSKLRTSTIMTDYNPNYCFAGKTSSISDLKEVPRKNITLIRGLGHGAFGEVYEGQVSGMPNDPSPLQVAVKTLPEVCSEQDELDFLMEALIISKFNHQNIVRCIGVSLQSLPRFILLELMAGGDLKSFLRETRPRPSQPSSLAMLDLLHVARDIACGCQYLEENHFIHRDIAARNCLLTCPGPGRVAKIGDFGMARDIYRASYYRKGGCAMLPVKWMPPEAFMEGIFTSKTDTWSFGVLLWEIFSLGYMPYPSKSNQEVLEFVTSGGRMDPPKNCPGPVYRIMTQCWQHQPEDRPNFAIILERIEYCTQDPDVINTALPIEYGPLVEEEEKVPVRPKDPEGVPPLLVSQQAKREEERSPAAPPPLPTTSSGKAAKKPTAAEISVRVPRGPAVEGGHVNMAFSQSNPPSELHKVHGSRNKPTSLWNPTYGSWFTEKPTKKNNPIAKKEPHDRGNLGLEGSCTVPPNVATGRLPGASLLLEPSSLTANMKEVPLFRLRHFPCGNVNYGYQQQGLPLEAATAPGAGHYEDTILKSKNSMNQPGP

SEQ ID NO: 76 - protein, 902 aa, Homo sapiens
MAAAKVALTKRADPAELRTIFLKYASIEKNGEFFMSPNDFVTRYLNIFGESQPNPKTVELLSGVVDQTKDGLISFQEFVAFESVLCAPDALFMVAFQLFDKAGKGEVTFEDVKQVFGQTTIHQHIPFNWDSEFVQLHFGKERKRHLTYAEFTQFLLEIQLEHAKQAFVQRDNARTGRVTAIDFRDIMVTIRPHVLTPFVEECLVAAAGGTTSHQVSFSYFNGFNSLLNNMELIRKIYSTLAGTRKDVEVTKEEFVLAAQKFGQVTPMEVDILFQLADLYEPRGRMTLADIERIAPLEEGTLPFNLAEAQRQKASGDSARPVLLQVAESAYRFGLGSVAGVYRRKHQELQAMQMELQSPEYKLSKLRTSTIMTDYNPNYCFAGKTSSISDLKEVPRKNITLIRGLGHGAFGEVYEGQVSGMPNDPSPLQVAVKTLPEVCSEQDELDFLMEALIISKFNHQNIVRCIGVSLQSLPRFILLELMAGGDLKSFLRETRPRPSQPSSLAMLDLLHVARDIACGCQYLEENHFIHRDIAARNCLLTCPGPGRVAKIGDFGMARDIYRASYYRKGGCAMLPVKWMPPEAFMEGIFTSKTDTWSFGVLLWEIFSLGYMPYPSKSNQEVLEFVTSGGRMDPPKNCPGPVYRIMTQCWQHQPEDRPNFAIILERIEYCTQDPDVINTALPIEYGPLVEEEEKVPVRPKDPEGVPPLLVSQQAKREEERSPAAPPPLPTTSSGKAAKKPTAAEISVRVPRGPAVEGGHVNMAFSQSNPPSELHKVHGSRNKPTSLWNPTYGSWFTEKPTKKNNPIAKKEPHDRGNLGLEGSCTVPPNVATGRLPGASLLLEPSSLTANMKEVPLFRLRHFPCGNVNYGYQQQGLPLEAATAPGAGHYEDTILKSKNSMNQPGP

SEQ ID NO: 77 - protein, 1436 aa, Homo sapiens
MDDSEVESTASILASVKEQEAQFEKLTRALEEERRHVSAQLERVRVSPQDANPLMANGTLTRRHQNGRFVGDADLERQKFSDLKLNGPQDHSHLLYSTIPRMQEPGQIVETYTEEDPEGAMSVVSVETSDDGTTRRTETTVKKVVKTVTTRTVQPVAMGPDGLPVDASSVSNNYIQTLGRDFRKNGNGGPGPYVGQAGTATLPRNFHYPPDGYSRHYEDGYPGGSDNYGSLSRVTRIEERYRPSMEGYRAPSRQDVYGPQPQVRVGGSSVDLHRFHPEPYGLEDDQRSMGYDDLDYGMMSDYGTARRTGTPSDPRRRLRSYEDMIGEEVPSDQYYWAPLAQHERGSLASLDSLRKGGPPPPNWRQPELPEVIAMLGFRLDAVKSNAAAYLQHLCYRNDKVKTDVRKLKGIPVLVGLLDHPKKEVHLGACGALKNISFGRDQDNKIAIKNCDGVPALVRLLRKARDMDLTEVITGTLWNLSSHDSIKMEIVDHALHALTDEVIIPHSGWEREPNEDCKPRHIEWESVLTNTAGCLRNVSSERSEARRKLRECDGLVDALIFIVQAEIGQKDSDSKLVENCVCLLRNLSYQVHREIPQAERYQEAAPNVANNTGPHAASCFGAKKGKGKKPIEDPANDTVDFPKRTSPARGYELLFQPEVVRIYISLLKESKTPAILEASAGAIQNLCAGRWTYGRYIRSALRQEKALSAIADLLTNEHERVVKAASGALRNLAVDARNKELIGKHAIPNLVKNLPGGQQNSSWNFSEDTVISILNTINEVIAENLEAAKKLRETQGIEKLVLINKSGNRSEKEVRAAALVLQTIWGYKELRKPLEKEGWKKSDFQVNLNNASRSQSSHSYDDSTLPLIDRNQKSVYRRKHQELQAMQMELQSPEYKLSKLRTSTIMTDYNPNYCFAGKTSSISDLKEVPRKNITLIRGLGHGAFGEVYEGQVSGMPNDPSPLQVAVKTLPEVCSEQDELDFLMEALIISKFNHQNIVRCIGVSLQSLPRFILLELMAGGDLKSFLRETRPRPSQPSSLAMLDLLHVARDIACGCQYLEENHFIHRDIAARNCLLTCPGPGRVAKIGDFGMARDIYRASYYRKGGCAMLPVKWMPPEAFMEGIFTSKTDTWSFGVLLWEIFSLGYMPYPSKSNQEVLEFVTSGGRMDPPKNCPGPVYRIMTQCWQHQPEDRPNFAIILERIEYCTQDPDVINTALPIEYGPLVEEEEKVPVRPKDPEGVPPLLVSQQAKREEERSPAAPPPLPTTSSGKAAKKPTAAEISVRVPRGPAVEGGHVNMAFSQSNPPSELHKVHGSRNKPTSLWNPTYGSWFTEKPTKKNNPIAKKEPHDRGNLGLEGSCTVPPNVATGRLPGASLLLEPSSLTANMKEVPLFRLRHFPCGNVNYGYQQQGLPLEAATAPGAGHYEDTILKSKNSMNQPGP

SEQ ID NO: 78 - protein, 981 aa, Homo sapiens
MSGLVLGQRDEPAGHRLSQEEILGSTRLVSQGLEALRSEHQAVLQSLSQTIECLQQGGHEEGLVHEKARQLRRSMENIELGLSEAQVMLALASHLSTVESEKQKLRAQVRRLCQENQWLRDELAGTQQRLQRSEQAVAQLEEEKKHLEFLGQLRQYDEDGHTSEEKEGDATKDSLDDLFPNEEEEDPSNGLSRGQGATAAQQGGYEIPARLRTLHNLVIQYAAQGRYEVAVPLCKQALEDLERTSGRGHPDVATMLNILALVYRDQNKYKEAAHLLNDALSIRESTLGPDHPAVAATLNNLAVLYGKRGKYKEAEPLCQRALEIREKVLGTNHPDVAKQLNNLALLCQNQGKYEAVERYYQRALAIYEGQLGPDNPNVARTKNNLASCYLKQGKYAEAETLYKEILTRAHVQEFGSVDVYRRKHQELQAMQMELQSPEYKLSKLRTSTIMTDYNPNYCFAGKTSSISDLKEVPRKNITLIRGLGHGAFGEVYEGQVSGMPNDPSPLQVAVKTLPEVCSEQDELDFLMEALIISKFNHQNIVRCIGVSLQSLPRFILLELMAGGDLKSFLRETRPRPSQPSSLAMLDLLHVARDIACGCQYLEENHFIHRDIAARNCLLTCPGPGRVAKIGDFGMARDIYRASYYRKGGCAMLPVKWMPPEAFMEGIFTSKTDTWSFGVLLWEIFSLGYMPYPSKSNQEVLEFVTSGGRMDPPKNCPGPVYRIMTQCWQHQPEDRPNFAIILERIEYCTQDPDVINTALPIEYGPLVEEEEKVPVRPKDPEGVPPLLVSQQAKREEERSPAAPPPLPTTSSGKAAKKPTAAEISVRVPRGPAVEGGHVNMAFSQSNPPSELHKVHGSRNKPTSLWNPTYGSWFTEKPTKKNNPIAKKEPHDRGNLGLEGSCTVPPNVATGRLPGASLLLEPSSLTANMKEVPLFRLRHFPCGNVNYGYQQQGLPLEAATAPGAGHYEDTILKSKNSMNQPGP

SEQ ID NO: 79 - protein, 834 aa, Homo sapiens
MSNSHPLRPFTAVGEIDHVHILSEHIGALLIGEEYGDVTFVVEKKRFPAHRVILAARCQYFRALLYGGMRESQPEAEIPLQDTTAEAFTMLLKYIYTGRATLTDEKEEVLLDFLSLAHKYGFPELEDSTSEYLCTILNIQNVCMTFDVASLYSLPKLTCMCCMFMDRNAQEVLSSEGFLSLSKTALLNIVLRDSFAAPEKDIFLALLNWCKHNSKENHAEIMQAVRLPLMSLTELLNVVRPSGLLSPDAILDAIKVRSESRDMDLNYRGMLMYRRKHQELQAMQMELQSPEYKLSKLRTSTIMTDYNPNYCFAGKTSSISDLKEVPRKNITLIRGLGHGAFGEVYEGQVSGMPNDPSPLQVAVKTLPEVCSEQDELDFLMEALIISKFNHQNIVRCIGVSLQSLPRFILLELMAGGDLKSFLRETRPRPSQPSSLAMLDLLHVARDIACGCQYLEENHFIHRDIAARNCLLTCPGPGRVAKIGDFGMARDIYRASYYRKGGCAMLPVKWMPPEAFMEGIFTSKTDTWSFGVLLWEIFSLGYMPYPSKSNQEVLEFVTSGGRMDPPKNCPGPVYRIMTQCWQHQPEDRPNFAIILERIEYCTQDPDVINTALPIEYGPLVEEEEKVPVRPKDPEGVPPLLVSQQAKREEERSPAAPPPLPTTSSGKAAKKPTAAEISVRVPRGPAVEGGHVNMAFSQSNPPSELHKVHGSRNKPTSLWNPTYGSWFTEKPTKKNNPIAKKEPHDRGNLGLEGSCTVPPNVATGRLPGASLLLEPSSLTANMKEVPLFRLRHFPCGNVNYGYQQQGLPLEAATAPGAGHYEDTILKSKNSMNQPGP

SEQ ID NO: 80 - skipped

SEQ ID NO: 81 - protein, 981 aa, Homo sapiens
MKFLIFAFFGGVHLLSLCSGKAICKNGISKRTFEEIKEEIASCGDVAKAIINLAVYGKAQNRSYERLALLVDTVGPRLSGSKNLEKAIQIMYQNLQQDGLEKVHLEPVRIPHWERGEESAVMLEPRIHKIAILGLGSSIGTPPEGITAEVLVVTSFDELQRRASEARGKIVVYNQPYINYSRTVQYRTQGAVEAAKVGALASLIRSVASFSIYSPHTGIQEYQDGVPKIPTACITVEDAEMMSRMASHGIKIVIQLKMGAKTYPDTDSFNTVAEITGSKYPEQVVLVSGHLDSWDVGQGAMDDGGGAFISWEALSLIKDLGLRPKRTLRLVLWTAEEQGGVGAFQYYQLHKVNISNYSLVMESDAGTFLPTGLQFTGSEKARAIMEEVMSLLQPLNITQVLSHGEGTDINFWIQAGVPVYRRKHQELQAMQMELQSPEYKLSKLRTSTIMTDYNPNYCFAGKTSSISDLKEVPRKNITLIRGLGHGAFGEVYEGQVSGMPNDPSPLQVAVKTLPEVCSEQDELDFLMEALIISKFNHQNIVRCIGVSLQSLPRFILLELMAGGDLKSFLRETRPRPSQPSSLAMLDLLHVARDIACGCQYLEENHFIHRDIAARNCLLTCPGPGRVAKIGDFGMARDIYRASYYRKGGCAMLPVKWMPPEAFMEGIFTSKTDTWSFGVLLWEIFSLGYMPYPSKSNQEVLEFVTSGGRMDPPKNCPGPVYRIMTQCWQHQPEDRPNFAIILERIEYCTQDPDVINTALPIEYGPLVEEEEKVPVRPKDPEGVPPLLVSQQAKREEERSPAAPPPLPTTSSGKAAKKPTAAEISVRVPRGPAVEGGHVNMAFSQSNPPSELHKVHGSRNKPTSLWNPTYGSWFTEKPTKKNNPIAKKEPHDRGNLGLEGSCTVPPNVATGRLPGASLLLEPSSLTANMKEVPLFRLRHFPCGNVNYGYQQQGLPLEAATAPGAGHYEDTILKSKNSMNQPGP

SEQ ID NO: 82 - skipped

SEQ ID NO: 83 - protein, 935 aa, Homo sapiens
MADPAECSIKVMCRFRPLNEAEILRGDKFIPKFKGDETVVIGQGKPYVFDRVLPPNTTQEQVYNACAKQIVKDVLEGYNGTIFAYGQTSSGKTHTMEGKLHDPQLMGIIPRIAHDIFDHIYSMDENLEFHIKVSYFEIYLDKIRDLLDVSKTNLAVHEDKNRVPYVKGCTERFVSSPEEVMDVIDEGKANRHVAVTNMNEHSSRSHSIFLINIKQENVETEKKLSGKLYLVDLAGSEKVSKTGAEGAVLDEAKNINKSLSALGNVISALAEGTKTHVPYRDSKMTRILQDSLGGNCRTTIVICCSPSVFNEAETKSTLMFGQRAKTIKNTVSVNLELTAEEWKKKYEKEKEKNKTLKNVIQHLEMELNRWRNVYRRKHQELQAMQMELQSPEYKLSKLRTSTIMTDYNPNYCFAGKTSSISDLKEVPRKNITLIRGLGHGAFGEVYEGQVSGMPNDPSPLQVAVKTLPEVCSEQDELDFLMEALIISKFNHQNIVRCIGVSLQSLPRFILLELMAGGDLKSFLRETRPRPSQPSSLAMLDLLHVARDIACGCQYLEENHFIHRDIAARNCLLTCPGPGRVAKIGDFGMARDIYRASYYRKGGCAMLPVKWMPPEAFMEGIFTSKTDTWSFGVLLWEIFSLGYMPYPSKSNQEVLEFVTSGGRMDPPKNCPGPVYRIMTQCWQHQPEDRPNFAIILERIEYCTQDPDVINTALPIEYGPLVEEEEKVPVRPKDPEGVPPLLVSQQAKREEERSPAAPPPLPTTSSGKAAKKPTAAEISVRVPRGPAVEGGHVNMAFSQSNPPSELHKVHGSRNKPTSLWNPTYGSWFTEKPTKKNNPIAKKEPHDRGNLGLEGSCTVPPNVATGRLPGASLLLEPSSLTANMKEVPLFRLRHFPCGNVNYGYQQQGLPLEAATAPGAGHYEDTILKSKNSMNQPGP

SEQ ID NO: 84 - protein, 594 aa, Homo sapiens
MAVASDFYLRYYVGHKGKFGHEFLEFEFRPDVYRRKHQELQAMQMELQSPEYKLSKLRTSTIMTDYNPNYCFAGKTSSISDLKEVPRKNITLIRGLGHGAFGEVYEGQVSGMPNDPSPLQVAVKTLPEVCSEQDELDFLMEALIISKFNHQNIVRCIGVSLQSLPRFILLELMAGGDLKSFLRETRPRPSQPSSLAMLDLLHVARDIACGCQYLEENHFIHRDIAARNCLLTCPGPGRVAKIGDFGMARDIYRASYYRKGGCAMLPVKWMPPEAFMEGIFTSKTDTWSFGVLLWEIFSLGYMPYPSKSNQEVLEFVTSGGRMDPPKNCPGPVYRIMTQCWQHQPEDRPNFAIILERIEYCTQDPDVINTALPIEYGPLVEEEEKVPVRPKDPEGVPPLLVSQQAKREEERSPAAPPPLPTTSSGKAAKKPTAAEISVRVPRGPAVEGGHVNMAFSQSNPPSELHKVHGSRNKPTSLWNPTYGSWFTEKPTKKNNPIAKKEPHDRGNLGLEGSCTVPPNVATGRLPGASLLLEPSSLTANMKEVPLFRLRHFPCGNVNYGYQQQGLPLEAATAPGAGHYEDTILKSKNSMNQPGP

SEQ ID NO: 85 - skipped

SEQ ID NO: 86 - protein, 1872 aa, Homo sapiens; identical to SEQ ID NO: 44

SEQ ID NO: 87 - DNA, 3966 bp, Homo sapiens
  source 1..3966: mol_type = unassigned DNA
atgtctgactcagtaattcttcgaagtataaagaaatttggagaggagaatgatggttttgagtcagataaatcatataataatgataagaaatcaaggttacaagatgagaagaaaggtgatggcgttagagttggcttctttcaattgtttcggttttcttcatcaactgacatttggctgatgtttgtgggaagtttgtgtgcatttctccatggaatagcccagccaggcgtgctactcatttttggcacaatgacagatgtttttattgactacgacgttgagttacaagaactccagattccaggaaaagcatgtgtgaataacaccattgtatggactaacagttccctcaaccagaacatgacaaatggaacacgttgtgggttgctgaacatcgagagcgaaatgatcaaatttgccagttactatgctggaattgctgtcgcagtacttatcacaggatatattcaaatatgcttttgggtcattgccgcagctcgtcagatacagaaaatgagaaaattttactttaggagaataatgagaatggaaatagggtggtttgactgcaattcagtgggggagctgaatacaagattctctgatgatattaataaaatcaatgatgccatagctgaccaaatggcccttttcattcagcgcatgacctcgaccatctgtggtttcctgttgggatttttcaggggttggaaactgaccttggttattatttctgtcagccctctcattgggattggagcagccaccattggtctgagtgtgtccaagtttacggactatgagctgaaggcctatgccaaagcaggggtggtggctgatgaagtcatttcatcaatgagaacagtggctgcttttggtggtgagaaaagagaggttgaaaggtatgagaaaaatcttgtgttcgcccagcgttggggaattagaaaaggaatagtgatgggattctttactggattcgtgtggtgtctcatctttttgtgttatgcactggccttctggtacggctccacacttgtcctggatgaaggagaatatacaccaggaacccttgtccagattttcctcagtgtcatagtaggagctttaaatcttggcaatgcctctccttgtttggaagcctttgcaactggacgtgcagcagccaccagcatttttgagacaatagacaggaaacccatcattgactgcatgtcagaagatggttacaagttggatcgaatcaagggtgaaattgaattccataatgtgaccttccattatccttccagaccagaggtgaagattctaaatgacctcaacatggtcattaaaccaggggaaatgacagctctggtaggacccagtggagctggaaaaagtacagcactgcaactcattcagcgattctatgacccctgtgaaggaatggtgaccgtggatggccatgacattcgctctcttaacattcagtggcttagagatcagattgggatagtggagcaagagccagttctgttctctaccaccattgcagaaaatattcgctatggcagagaagatgcaacaatggaagacatagtccaagctgccaaggaggccaatgcctacaacttcatcatggacctgccacagcaatttgacacccttgttggagaaggaggaggccagatgagtggtggccagaaacaaagggtagctatcgccagagccctcatccgaaatcccaagattctgcttttggacatggccacctcagctctggacaatgagagtgaagccatggtgcaagaagtgctgagtaagattcagcatgggcacacaatcatttcagttgctcatcgcttgtctacggtcagagctgcagataccatcattggttttgaacatggcactgcagtggaaagagggacccatgaagaattactggaaaggaaaggtgtttacttcactctagtgactttgcaaagccagggaaatcaagctcttaatgaagaggacataaaggatgcaactgaagatgacatgcttgcgaggacctttagcagagggagctaccaggatagtttaagggcttccatccggcaacgctccaagtctcagctttcttacctggtgcacgaacctccattagctgttgtagatcataagtctacctatgaagaagatagaaaggacaaggacattcctgtgcaggaagaagttgaacctgccccagttaggaggattctgaaattcagtgctccagaatggccctacatgctggtagggtctgtgggtgcagctgtgaacgggacagtcacacccttgtatgcctttttattcagccagattcttgggactttttcaattcctgataaagaggaacaaaggtcacagatcaatggtgtgtgcctactttttgtagcaatgggctgtgtatctcttttcacccaatttctacagggatatgcctttgctaaatctggggagctcctaacaaaaaggctacgtaaatttggtttcagggcaatgctggggcaagatattgcctggtttgatgacctcagaaatagccctggagcattgacaacaagacttgctacagatgcttcccaagttcaaggggctgccggctctcagatcgggatgatagtcaattccttcactaacgtcactgtggccatgatcattgccttctcctttagctggaagctgagcctggtcatcttgtgcttcttccccttcttggctttatcaggagccacacagaccaggatgttgacaggatttgcctctcgagataagcaggccctggagatggtgggacagattacaaatgaagccctcagtaacatccgcactgttgctggaattggaaaggagaggcggttcattgaagcacttgagactgagctggagaagcccttcaagacagccattcagaaagccaatatttacggattctgctttgcctttgcccagtgcatcatgtttattgcgaattctgcttcctacagatatggaggttacttaatctccaatgaggggctccatttcagctatgtgttcagggtgatctctgcagttgtactgagtgcaacagctcttggaagagccttctcttacaccccaagttatgcaaaagctaaaatatcagctgcacgcttttttcaactgctggaccgacaacccccaatcagtgtatacaatactgcaggtgaaaaatgggacaacttccaggggaagattgattttgttgattgtaaatttacatatccttctcgacctgactcgcaagttctgaatggtctctcagtgtcgattagtccagggcagacactggcgtttgttgggagcagtggatgtggcaaaagcactagcattcagctgttggaacgtttctatgatcctgatcaagggaaggtgatgatagatggtcatgacagcaaaaaagtaaatgtccagttcctccgctcaaacattggaattgtttcccaggaaccagtgttgtttgcctgtagcataatggacaatatcaagtatggagacaacaccaaagaaattcccatggaaagagtcatagcagctgcaaaacaggctcagctgcatgattttgtcatgtcactcccagagaaatatgaaactaacgttgggtcccaggggtctcaactctctagaggggagaaacaacgcattgctattgctcgggccattgtacgagatcctaaaatcttgctactagatgaagccacttctgccttagacacagaaagtgaaaagacggtgcaggttgctctagacaaagccagagagggtcggacctgcattgtcattgcccatcgcttgtccaccatccagaacgcggatatcattgctgtcatggcacagggggtggtgattgaaaaggggacccatgaagaactgatggcccaaaaaggagcctactacaaactagtcaccactggatcccccatcagttga

SEQ ID NO: 88 - DNA, 2736 bp, Homo sapiens
  source 1..2736: mol_type = unassigned DNA
atggtggactaccacgcggcgaaccagtcgtaccagtacggccccagcagcgcgggcaatggcgctggcggcgggggcagcatgggcgactacatggcccaggaggacgactgggaccgggacctgctgctggacccggcctgggagaagcagcagcgcaagaccttcacggcatggtgcaactcccacctgcggaaggcaggcacacagatcgagaacattgatgaggacttccgagacgggctcaagctcatgctgctcctggaggtcatatcaggggagcggttacctaagccggagcgggggaagatgagagtgcacaaaatcaacaatgtgaacaaagcgctggactttattgccagcaaaggcgtcaagctggtctccatcggggcagaagagattgtggacggcaacgcaaagatgaccctgggaatgatctggaccatcatccttaggttcgccatccaggacatctccgtggaagagacctcggccaaggaagggctccttctctggtgccagagaaagacagccccgtataagaacgtcaatgtgcagaacttccacatcagctggaaggatggtcttgccttcaatgccctgatccaccggcacagaccagagctgattgagtatgacaagctgaggaaggacgaccctgtcaccaacctgaacaatgccttcgaagtggctgagaaatacctcgacatccccaagatgctggatgcagaggacatcgtgaacacggcccggcccgacgagaaggccataatgacctatgtgtccagcttctaccatgccttttcaggagcgcagaaggctgaaactgccgccaaccggatctgtaaggtgctggctgtcaaccaagagaacgagcacctgatggaggactacgagaagctggccagcgacctcctggagtggatccggcgcaccatcccctggctggaggaccgtgtgccccaaaagactatccaggagatgcagcagaagctggaggacttccgcgactaccggcgtgtgcacaagccgcccaaggtgcaggagaagtgccagctggagatcaacttcaacacgctgcagaccaagctgcgcctcagcaaccggcccgccttcatgccctccgagggcaagatggtctcggacatcaacaatggctggcagcacttggagcaggctgagaagggctacgaggagtggctgctgaatgagatccgcaggctggagcggctcgaccacctggcagagaagttccggcagaaggcctccatccacgaggcctggactgacgggaaggaagccatgctgaagcaccgggactacgagacggccacactatcggacatcaaagccctcattcgcaagcacgaggccttcgagagcgacctggctgcgcaccaggaccgcgtggagcagatcgccgccattgcccaggagctcaacgagctggattactacgactcccacaatgtcaacacccggtgccagaagatctgtgaccagtgggacgccctcggctctctgacacatagtcgcagggaagccctggagaaaacagagaagcagctggaggccatcgaccagctgcacctggaatacgccaagcgcgcggcccccttcaacaactggatggagagcgccatggaggacctccaggacatgttcatcgtccataccatcgaggagattgagggcctgatctcagcccatgaccagttcaagtccaccctgccggacgccgatagggagcgcgaggccatcctggccatccacaaggaggcccagaggatcgctgagagcaaccacatcaagctgtcgggcagcaacccctacaccaccgtcaccccgcaaatcatcaactccaagtgggagaaggtgcagcagctggtgccaaaacgggaccatgccctcctggaggagcagagcaagcagcagtccaacgagcacctgcgccgccagttcgccagccaggccaatgttgtggggccctggatccagaccaagatggaggagatcgggcgcatctccattgagatgaacgggaccctggaggaccagctgagccacctgaagcagtatgaacgcagcatcgtggactacaagcccaacctggacctgctggagcagcagcaccagctcatccaggaggccctcatcttcgacaacaagcacaccaactataccatggagcacatccgcgtgggctgggagcagctgctcaccaccattgcccgcaccatcaacgaggtggagaaccagatcctcacccgcgacgccaagggcatcagccaggagcagatgcaggagttccgggcgtccttcaaccacttcgacaaggatcatggcggggcgctggggcccgaggagttcaaggcctgcctcatcagcctgggctacgacgtggagaacgaccggcagggtgaggccgagttcaaccgcatcatgagcctggtcgaccccaaccatagcggccttgtgaccttccaagccttcatcgacttcatgtcgcgggagaccaccgacacggacacggctgaccaggtcatcgcttccttcaaggtcttagcaggggacaagaacttcatcacagctgaggagctgcggagagagctgccccccgaccaggccgagtactgcatcgcccgcatggcgccataccagggccctgacgccgtgcccggtgccctcgactacaagtccttctccacggccttgtatggcgagagcgacctgtga

SEQ ID NO: 89 - DNA, 2415 bp, Homo sapiens
  source 1..2415: mol_type = unassigned DNA
atgaactaccagcagcagctggccaactcggctgccatccgggccgagatccagcgcttcgagtcggtccaccccaacatctactccatctacgagctgctggagcgcgtggaggagccggtgctgcagaaccagatccgggagcacgtcatcgccatcgaagatgccttcgtgaacagccaggaatggacgctgagtcgatctgtcccggagctcaaagtgggaattgtgggtaacttggccagcggcaagtctgccctggtgcaccggtacctgacgggcacatatgtccaggaggagtctccggaaggtggcaggttcaagaaagagattgtcgttgatggacagagctatctgctgctgatcagagatgaagggggccccccggaggcgcagtttgccatgtgggtggacgctgttatatttgtcttcagcttggaggatgaaataagtttccagaccgtttaccactactacagtcgaatggccaactatcggaacacgagcgagattcctctggttctggtgggaacccaggatgccataagttctgctaacccgagggtcatcgatgacgccagggcgaggaagctctccaacgacctgaaacggtgcacgtactacgagacgtgtgctacatacgggctgaatgtggagagggtcttccaggacgttgcccagaagattgttgccacaaggaagaagcagcagctgtccataggaccctgcaagtcgctacctaattctcccagccattcctccgtctgttccgcgcaggtgtctgccgtgcacatcagccagacaagtaatggaggtgggagtttaagcgactattcctcctccgttccatcgactcccagcaccagccagaaggaacttcggatcgatgttcctcccactgccaacacgcccacgcccgttcgcaagcagtctaagcgccggtccaacctgttcacctctcggaaagggagcgacccagacaaagagaagaaaggcctggagagtcgtgcggacagcattgggagcggccgagccatcccaattaaacagggcatgctgttgaagcgaagtggcaaatcgttgaataaagagtggaaaaagaaatatgtcaccctgtgtgacaatggcgtgctgacctatcatcccagtttacatgattacatgcagaatgttcatggtaaggagattgaccttctgagaaccactgtgaaagtcccagggaagaggccaccccgagccacgtcagcctgcgcacccatctccagccctaaaaccaatggcctatccaaggacatgagcagtttacacatctcacccaattcagacacagggctgggtgactccgtatgctccagccccagtatctccagcaccaccagccccaagctcgacccgcccccctcccctcacgccaacagaaagaagcaccgaaggaagaaaagcactagcaacttcaaagccgacggcctgtccggcactgctgaagaacaagaagaaaattttgagtttatcattgtgtccctcactggccaaacatggcactttgaagccacgacgtatgaggagcgggacgcctgggtccaagccatcgagagccagatcctggccagcctgcagtcgtgcgagagcagcaagaacaagtcccggctgacgagccagagcgaggccatggccctgcagtcgatccggaacatgcgcgggaactcccactgtgtggactgcgagacccagaatcccaactgggccagtttgaacttgggagccctcatgtgcatcgaatgctcagggatccaccggaatcttggcacccacctttcccgagtccgatctctggacctggatgactggccagtcgagctcatcaaggtgatgtcatccatcgggaacgagctagccaacagcgtctgggaagagagcagccaggggcggacgaaaccatcggtagactccacaagggaagagaaggaacggtggatccgtgccaagtacgagcagaagctcttcctggccccgctgccctgcacggagctgtccctgggccagcacctgctgcgggccaccgccgacgaggacctgcggacggccatcctgctgctggcacacggctcccgggacgaggtgaacgagacctgcggggagggagacggccgcacggcgctgcatctggcctgccgcaaggggaatgtggtcctggcgcagctcctgatctggtacggagtggacgtcacggcccgagatgcccacgggaacacagctctggcctacgcccggcaggcctccagccaggagtgcatcgacgtgctgctgcagtacggctgccccgacgagcgcttcgtgctcatggccacccctaacctgtccaggagaaacaataaccggaacaacagcagtgggagggtgcccaccatcatctga

SEQ ID NO: 90 - DNA, 4863 bp, Homo sapiens
  source 1..4863: mol_type = unassigned DNA
atgggagccatcgggctcctgtggctcctgccgctgctgctttccacggcagctgtgggctccgggatggggaccggccagcgcgcgggctccccagctgcggggccgccgctgcagccccgggagccactcagctactcgcgcctgcagaggaagagtctggcagttgacttcgtggtgccctcgctcttccgtgtctacgcccgggacctactgctgccaccatcctcctcggagctgaaggctggcaggcccgaggcccgcggctcgctagctctggactgcgccccgctgctcaggttgctggggccggcgccgggggtctcctggaccgccggttcaccagccccggcagaggcccggacgctgtccagggtgctgaagggcggctccgtgcgcaagctccggcgtgccaagcagttggtgctggagctgggcgaggaggcgatcttggagggttgcgtcgggccccccggggaggcggctgtggggctgctccagttcaatctcagcgagctgttcagttggtggattcgccaaggcgaagggcgactgaggatccgcctgatgcccgagaagaaggcgtcggaagtgggcagagagggaaggctgtccgcggcaattcgcgcctcccagccccgccttctcttccagatcttcgggactggtcatagctccttggaatcaccaacaaacatgccttctccttctcctgattattttacatggaatctcacctggataatgaaagactccttccctttcctgtctcatcgcagccgatatggtctggagtgcagctttgacttcccctgtgagctggagtattcccctccactgcatgacctcaggaaccagagctggtcctggcgccgcatcccctccgaggaggcctcccagatggacttgctggatgggcctggggcagagcgttctaaggagatgcccagaggctcctttctccttctcaacacctcagctgactccaagcacaccatcctgagtccgtggatgaggagcagcagtgagcactgcacactggccgtctcggtgcacaggcacctgcagccctctggaaggtacattgcccagctgctgccccacaacgaggctgcaagagagatcctcctgatgcccactccagggaagcatggttggacagtgctccagggaagaatcgggcgtccagacaacccatttcgagtggccctggaatacatctccagtggaaaccgcagcttgtctgcagtggacttctttgccctgaagaactgcagtgaaggaacatccccaggctccaagatggccctgcagagctccttcacttgttggaatgggacagtcctccagcttgggcaggcctgtgacttccaccaggactgtgcccagggagaagatgagagccagatgtgccggaaactgcctgtgggtttttactgcaactttgaagatggcttctgtggctggacccaaggcacactgtcaccccacactcctcaatggcaggtcaggaccctaaaggatgcccggttccaggaccaccaagaccatgctctattgctcagtaccactgatgtccccgcttctgaaagtgctacagtgaccagtgctacgtttcctgcaccgatcaagagctctccatgtgagctccgaatgtcctggctcattcgtggagtcttgaggggaaacgtgtccttggtgctagtggagaacaaaaccgggaaggagcaaggcaggatggtctggcatgtcgccgcctatgaaggcttgagcctgtggcagtggatggtgttgcctctcctcgatgtgtctgacaggttctggctgcagatggtcgcatggtggggacaaggatccagagccatcgtggcttttgacaatatctccatcagcctggactgctacctcaccattagcggagaggacaagatcctgcagaatacagcacccaaatcaagaaacctgtttgagagaaacccaaacaaggagctgaaacccggggaaaattcaccaagacagacccccatctttgaccctacagttcattggctgttcaccacatgtggggccagcgggccccatggccccacccaggcacagtgcaacaacgcctaccagaactccaacctgagcgtggaggtggggagcgagggccccctgaaaggcatccagatctggaaggtgccagccaccgacacctacagcatctcgggctacggagctgctggcgggaaaggcgggaagaacaccatgatgcggtcccacggcgtgtctgtgctgggcatcttcaacctggagaaggatgacatgctgtacatcctggttgggcagcagggagaggacgcctgccccagtacaaaccagttaatccagaaagtctgcattggagagaacaatgtgatagaagaagaaatccgtgtgaacagaagcgtgcatgagtgggcaggaggcggaggaggagggggtggagccacctacgtatttaagatgaaggatggagtgccggtgcccctgatcattgcagccggaggtggtggcagggcctacggggccaagacagacacgttccacccagagagactggagaataactcctcggttctagggctaaacggcaattccggagccgcaggtggtggaggtggctggaatgataacacttccttgctctgggccggaaaatctttgcaggagggtgccaccggaggacattcctgcccccaggccatgaagaagtgggggtgggagacaagagggggtttcggagggggtggaggggggtgctcctcaggtggaggaggcggaggatatataggcggcaatgcagcctcaaacaatgaccccgaaatggatggggaagatggggtttccttcatcagtccactgggcatcctgtacaccccagctttaaaagtgatggaaggccacggggaagtgaatattaagcattatctaaactgcagtcactgtgaggtagacgaatgtcacatggaccctgaaagccacaaggtcatctgcttctgtgaccacgggacggtgctggctgaggatggcgtctcctgcattgtgtcacccaccccggagccacacctgccactctcgctgatcctctctgtggtgacctctgccctcgtggccgccctggtcctggctttctccggcatcatgattgtgtaccgccggaagcaccaggagctgcaagccatgcagatggagctgcagagccctgagtacaagctgagcaagctccgcacctcgaccatcatgaccgactacaaccccaactactgctttgctggcaagacctcctccatcagtgacctgaaggaggtgccgcggaaaaacatcaccctcattcggggtctgggccatggcgcctttggggaggtgtatgaaggccaggtgtccggaatgcccaacgacccaagccccctgcaagtggctgtgaagacgctgcctgaagtgtgctctgaacaggacgaactggatttcctcatggaagccctgatcatcagcaaattcaaccaccagaacattgttcgctgcattggggtgagcctgcaatccctgccccggttcatcctgctggagctcatggcggggggagacctcaagtccttcctccgagagacccgccctcgcccgagccagccctcctccctggccatgctggaccttctgcacgtggctcgggacattgcctgtggctgtcagtatttggaggaaaaccacttcatccaccgagacattgctgccagaaactgcctcttgacctgtccaggccctggaagagtggccaagattggagacttcgggatggcccgagacatctacagggcgagctactatagaaagggaggctgtgccatgctgccagttaagtggatgcccccagaggccttcatggaaggaatattcacttctaaaacagacacatggtcctttggagtgctgctatgggaaatcttttctcttggatatatgccataccccagcaaaagcaaccaggaagttctggagtttgtcaccagtggaggccggatggacccacccaagaactgccctgggcctgtataccggataatgactcagtgctggcaacatcagcctgaagacaggcccaactttgccatcattttggagaggattgaatactgcacccaggacccggatgtaatcaacaccgctttgccgatagaatatggtccacttgtggaagaggaagagaaagtgcctgtgaggcccaaggaccctgagggggttcctcctctcctggtctctcaacaggcaaaacgggaggaggagcgcagcccagctgccccaccacctctgcctaccacctcctctggcaaggctgcaaagaaacccacagctgcagagatctctgttcgagtccctagagggccggccgtggaagggggacacgtgaatatggcattctctcagtccaaccctccttcggagttgcacaaggtccacggatccagaaacaagcccaccagcttgtggaacccaacgtacggctcctggtttacagagaaacccaccaaaaagaataatcctatagcaaagaaggagccacacgacaggggtaacctggggctggagggaagctgtactgtcccacctaacgttgcaactgggagacttccgggggcctcactgctcctagagccctcttcgctgactgccaatatgaaggaggtacctctgttcaggctacgtcacttcccttgtgggaatgtcaattacggctaccagcaacagggcttgcccttagaagccgctactgcccctggagctggtcattacgaggataccattctgaaaagcaagaatagcatgaaccagcctgggccctga

SEQ ID NO: 91 - DNA, 744 bp, Homo sapiens
  source 1..744: mol_type = unassigned DNA
atgggggctgcggtgtttttcggctgcactttcgtcgcgttcggcccggccttcgcgcttttcttgatcactgtggctggggacccgcttcgcgttatcatcctggtcgcaggggcatttttctggctggtctccctgctcctggcctctgtggtctggttcatcttggtccatgtgaccgaccggtcagatgcccggctccagtacggcctcctgatttttggtgctgctgtctctgtccttctacaggaggtgttccgctttgcctactacaagctgcttaagaaggcagatgaggggttagcatcgctgagtgaggacggaagatcacccatctccatccgccagatggcctatgtttctggtctctccttcggtatcatcagtggtgtcttctctgttatcaatattttggctgatgcacttgggccaggtgtggttgggatccatggagactcaccctattacttcctgacttcagcctttctgacagcagccattatcctgctccataccttttggggagttgtgttctttgatgcctgtgagaggagacggtactgggctttgggcctggtggttgggagtcacctactgacatcgggactgacattcctgaacccctggtatgaggccagcctgctgcccatctatgcagtcactgtttccatggggctctgggccttcatcacagctggagggtccctccgaagtattcagcgcagcctcttgtgtaaggactga

SEQ ID NO: 92 - DNA, 1179 bp, Homo sapiens
  source 1..1179: mol_type = unassigned DNA
atggatgcactggtagaagatgatatctgtattctgaatcatgaaaaagcccataagagagatacagtgactccagtttcaatatattcaggagatgaatctgttgcttcccattttgctcttgtcactgcatatgaagacatcaaaaaacgacttaaggattcagagaaagagaactctttgttaaagaagagaataagatttttggaagaaaagctaatagctcgatttgaagaagaaacaagttccgtgggacgagaacaagtaaataaggcctatcatgcatatcgagaggtttgcattgatagagataatttgaagagcaaactggacaaaatgaataaagacaactctgaatctttgaaagtattgaatgagcagctacaatctaaagaagtagaactcctccagctgaggacagaggtggaaactcagcaggtgatgaggaatttaaatccaccttcatcaaactgggaggtggaaaagttgagctgtgacctgaagatccatggtttggaacaagagctggaactgatgaggaaagaatgtagcgatctcaaaatagaactacagaaagccaaacaaacggatccatatcaggaagacaatctgaagagcagagatctccaaaaactaagcatttcaagtgataatatgcagcatgcatactgggaactgaagagagaaatgtctaatttacatctggtgactcaagtacaagctgaactactaagaaaactgaaaacctcaactgcaatcaagaaagcctgtgcccctgtaggatgcagtgaagaccttggaagagacagcacaaaactgcacttgatgaattttactgcaacatacacaagacatccccctctcttaccaaatggcaaagctctttgtcataccacatcttcccctttaccaggagatgtaaaggttttatcagagaaagcaatcctccaatcatggacagacaatgagagatccattcctaatgatggtacatgctttcaggaacacagttcttatggcagaaattctctggaagacaattcctgggtatttccaagtcctcctaaatcaagtgagacagcatttggggaaactaaaactaaaactttgcctttacccaaccttccaccactgcattacttggatcaacataatcagaactgcctttataagaattaa

SEQ ID NO: 93 - DNA, 1839 bp, Homo sapiens
  source 1..1839: mol_type = unassigned DNA
atgagtaacagccaccctcttcgcccctttactgcagtgggggaaattgatcatgtgcacattttgtctgaacatattggtgccttgttgattggggaagaatatggcgacgtcacattcgtggtggaaaagaaacgttttcctgcccacagggtaattttagcagccaggtgccaatattttcgagcattattatatggtggaatgcgagagtctcagcctgaagcagaaattcctctccaagacaccactgcagaagcattcacaatgctactcaaatatatctacactgggcgggcaacgctgacagatgagaaggaggaggtgctgctggactttttgagcctggctcataaatatggatttccagagctagaggattctacctctgagtatctctgcaccatacttaacattcagaatgtctgcatgacttttgatgttgccagtctctactcacttcccaagttaacttgtatgtgctgcatgtttatggataggaatgctcaggaagtcctctcaagtgaaggtttcctctccctttctaagacagcacttttaaacatcgtgttaagagactcatttgcagctcccgaaaaagatattttcctagccttattaaactggtgtaagcacaattcaaaggagaatcatgctgaaatcatgcaggctgtgcgtttacctctcatgagcctcacagagcttctgaatgttgtgaggccttcaggactgctgtctcctgatgccatcctggatgccattaaagtgcgatctgagagccgggatatggacctcaattatagaggcatgctcataccagaagaaaacattgcaactatgaagtatggagcccaagttgtaaagggggagctgaaatcagccttattagatggtgatactcaaaattatgatttggatcatggattttcaaggcacccaattgatgatgactgccgttccggcatcgagattaagctaggtcagccatccattatcaatcacatacggatactcttgtgggaccgagatagccggtcttactcatacttcattgaagtgtcaatggatgaacttgattgggtcagagtgatagatcattcacaatatctgtgtcgttcttggcagaaattatattttccagcccgtgtctgcaggtatattcgaattgttgggactcacaacacagtgaacaagatttttcacattgtggcttttgaatgtatgtttacaaacaaaaccttcactcttgagaaggggctgatagttcccatggagaatgttgcaacaattgctgattgtgccagtgtgattgaaggagtcagtcggagccgaaatgccttgctgaatggggacactaagaattatgactgggattctggctacacatgtcaccagctaggaagtggtgcgattgtggttcagttggcacaaccgtacatgattgggtcaatacggttactactttgggattgtgatgatcgaagctatagctactacgttgaggtttctaccaaccagcaacagtggaccatggttgctgacagaactaaagtctcctgcaagtcctggcagtcagtaacttttgaaaggcagcctgcctccttcatccgtatcgttgggacacacaacacagcaaatgaggtgttccactgtgtccactttgagtgtccagagcagcagagcagccagaaggaggaaaatagtgaggaatcggggacaggggacaccagcctggccggtcagcagctcgactcccatgcgctgcgggcgcctagtggcagctcactaccctccagcccaggctccaactcacgctcccccaaccggcagcaccaataa

SEQ ID NO: 94 - skipped

SEQ ID NO: 95 - DNA, 864 bp, Homo sapiens
  source 1..864: mol_type = unassigned DNA
atggaggaaaaggaagataagcatcaacagcataaaatagaggatgctgctataacatatgtaagtgaaaatgaagaaattaaacacgaagaaaaacctggaaaaagcatacatcattcaaaatcacatgttggaagaggacgtatatattatgctaaattcattaacacaaatgcaagaacatacaatgaaccatttccctacatagatcccaaaaaagggccagaaatacagggtgactggtggtcacatggtaaagcactggaacctgtcttcctaccaccttacgactctaagagcacccagaggagtgacttccaaaaaccatcgtgtccactggttttgccagtcaaacacagcaagatgcaaaagccttcttgtggaatagtaccacttgcctctcctggtacatcagcagaacttcaaaacaattttatagaatacatctcttttatacatcaatatgatgccagaaaaactccgaatgagcctctccagggaaagagacacggagcttttgtacagagagagataaaaccaggcagtaggccaacagttcctaaaggagcagaggtattactgaacactccagggtcacgttcatcagaacagtccaaaaaaacagagaaaggaaactcagcggaaagcagaatgatctcaccaggtctctgccaacaaaattctcaggagctgttagagcctaaaactcacttatcagaaacagacgtcagacaggcagccaaggcatgccccagcactcctgagagcagagaaaagacctcaggcgccactcaaacaactgtaggagatgctcttttcactaggcacaagcctttaaatccaccaattaaaaaatcagaataa

SEQ ID NO: 96 - DNA, 2055 bp, Homo sapiens
  source 1..2055: mol_type = unassigned DNA
atgtctctgtggccacctttccgatgcagatggaagctggcgccaaggtactctaggagggcgtctccacagcaaccccaacaggactttgaggccctgctggcagagtgcctgaggaatggctgcctctttgaagacaccagcttcccggccaccctgagctccatcggcagtggctccctgctgcagaagctgccaccccgcctgcagtggaagaggcccccggagctgcacagcaatccccagttttattttgccaaggccaaaaggctggatctgtgccaggggatagtaggagactgctggttcttggctgctttgcaagctctggccttgcaccaggacatcctgagccgggttgttcccctgaatcagagtttcactgagaagtatgctggcatcttccggttctggttctggcactatgggaactgggttcctgtggtgatcgatgaccgtctgcctgtgaatgaggctggccagctggtctttgtctcctccacctataagaacttgttctggggagcacttctggaaaaggcctatgccaagctctctggttcctatgaagacttgcagtcaggacaggtgtctgaagcccttgtagacttcactggaggggtgacaatgaccatcaacctggcagaagcccatggcaacctctgggacatcctcatcgaagccacctacaacagaaccctcattggctgccagacccactcaggggagaagattctggagaatgggctggtggaaggccatgcctatactctcacaggaatcaggaaggtgacctgcaaacatagacctgaatatctcgtcaagctacggaacccctggggaaaggtggaatggaaaggagactggagtgacagttcaagtaaatgggagctgctgagccccaaggagaagattctgcttctgaggaaagacaatgacggagaattctggatgacgctgcaggactttaaaacacatttcgtgctcctggttatctgtaaactgaccccaggcctgttgagccaggaggcggcccagaagtggacgtacaccatgcgggaggggagatgggagaagcggagcacagctggtggccagaggcagttgctgcaggacacattttggaagaacccgcagttcctgctgtctgtctggaggcccgaggagggcaggagatccctgaggccctgcagcgtgctggtgtccctgctccagaagcccaggcacaggtgccgcaagcggaagcctctcctcgccattggcttctacctgtataggatgaacaagtaccatgatgaccagaggagactgccccctgagttcttccagagaaacactcctctgagccagcctgataggtttctcaaggagaaagaagtgagtcaggagctgtgtctggaaccagggacgtacctcatcgtgccctgcatattggaggcccaccagaagtcagagttcgtcctcagggtcttctccaggaagcacatcttttatgaaattggcagcaattctggtgtcgtcttctcaaaggagatagaagaccaaaatgaaaggcaggatgaattcttcaccaaattctttgaaaagcatccagagattaatgcagttcaacttcagaacctcctgaaccagatgacctggtcaagtctggggagcagacagcccttctttagcctggaagcctgccaggggatcctggccttactggaccttaatgcatcaggtactatgagcatccaggaattcagggacctgtggaagcagctgaagctctctcagaaggttttccacaagcaagaccgtgggtcaggatacctgaactgggagcagctgcacgctgccatgagggaggcaggaatcatgctcagtgatgacgtctgtcagctgatgctcatccgctacggcggcccccgcctccagatggactttgtcagtttcatccacttgatgctgcgtgtagagaacatggaggatgtcttccaaaacttaacccaagatggcaaagggatatacctccagaagccagagtggatgatgatggcactgtactcctga

SEQ ID NO: 97 - DNA, 4116 bp, Homo sapiens
  source 1..4116: mol_type = unassigned DNA
atgaccgaggagagctctgacgttcccagggagttgatagaaagcataaaggatgttattggcagaaagataaaaatttcagtgaagaagaaagtaaagttggaagttaagggagacaaagttgaaaacaaagtgctggtccttacatcatgccgagccttccttgtaacagcgcgaatccccaccaagctcgagttaaccttcagctacttggagattcatggcgtcgtttgcagcaagtcagctcagatgattgtggaaactgagaagtgcagcatttccatgaagatggcgtcacccgaggacgtgagtgaggtgctggctcacataggcacctgcctgaggaagatatttcctggcctctctccagtgagaatcatgaaaaaagtctccatggagccatctgagcgcctggctagtctccaggcgctgtgggacagccagaccgtggctgagcagggcccctgtggtggattttctcagatgtatgcctgtgtttgtgactggcttggattttcatacagggaagaagtacaatgggatgtggatacaatttatcttacccaagacaccagggaattgaatttacaagattttagtcatcttgaccacagggacctaatacctatcattgctgctctggaatataatcagtggttcacaaaactgtcctctaaggatctaaaactgtccactgatgtctgtgaacagatcttgagggtggtgagtaggtccaatcgactggaagaattggtgttggaaaatgctggacttagaacagattttgcacaaaaactggccagtgctctagcacataatcccaactcaggactccacacaattaaccttgctggcaacccactggaggatagaggtgtgtcctctttaagtattcaatttgccaaactcccaaagggattaaagcacttaaatttatctaaaacctcattatcacctaaaggggtgaacagcctttctcagtcactcagtgccaatccattgaccgcctctacccttgtccacctcgacctctcagggaacgtccttcgtggagatgacctctcacacatgtataattttttggcccagccaaatgccattgttcatctggatttatccaatacagaatgttccctggacatggtctgtggagctcttctccgtggatgccttcaatatttagctgtgctcaacctctccagaactgtcttctctcaccggaaaggaaaagaagtacctccatctttcaagcaattttttagtagttctctggctttgatgcacatcaacctttcaggcacaaaactgtctcctgagcccttaaaagcactgttattgggcctggcttgtaatcataacttgaaaggggtttctctggatctcagcaactgtgagctgagatcaggaggtgctcaagtattagaaggttgcattgctgaaatacacaacatcaccagcttagacatctctgacaatggtttagaatctgacctatctaccttaatagtgtggctcagtaaaaacagatcaatacaacacctggcgttaggcaaaaattttaataatatgaaatccaaaaatctgacacctgtattggacaacttagtacagatgattcaagatgaagaatcacctctgcagtccttgtccctggctgactcgaaactcaagactgaggtcaccatcatcatcaatgccctgggaagcaacacctccctgaccaaagtggacattagcggcaacggaatgggggacatgggagcgaagatgctggccaaagcactgcagatcaacactaagctcaggactgtaatatgggacaagaacaacatcactgcacaaggctttcaggatatagctgttgctatggaaaagaactacacattaagatttatgccaattcctatgtatgatgcttctcaagccctaaaaacaaaccctgaaaaaacagaagacgctctgcaaaagatagaaaactacctgctacgaaatcacgagactagaaaataccttcaagagcaggcctaccgcctgcagcagggtattgtcaccagcaccacccagcagatgattgacagaatatgtgtgaaagtacaagatcatctcaactccttacgaaattgtgggggagacgctatccaggaagatttaaaatcagcagagcggctcatgcgtgatgctaagaactctaaaacgttgttaccaaatttataccatgttggtggtgcatcttgggcgggagccagtggcttactatccagtccaattcaggagaccctggaatcaatggctggagaagttacaagagtagtagatgaacaactaaaggcgttgcttgagtccatggttgatgctgctgagaatctttgtcccaatgtgatgaaaaaagcccacattcgacaagacttgattcatgccagcaccgaaaagatttctattccacgtacctttgttaaaaatgtcctgttggagcagtctggaattgatatccttaacaaaattagtgaagtaaaattgacagtggcctcgttcctgtctgatagaattgtggatgaaatcctggatgcactctcacattgccatcataaactggctgaccatttcagcagacgtggcaagacccttcctcaacaagaatccttagagatcgagctggctgaggagaagccagttaaacgttccatcatcacagtggaggagctaacagagatagagcgtttggaagatctggatacctgtatgatgacccctaaatccaaaaggaagagtatccatagccgaatgctgcggcctgtttctagggcttttgaaatggagtttgatctagataaagcgctggaagaggtaccaattcacatcgaagacccgcccttcccatccctcagacaggagaagcggagctcgggatttatctctgagttgccctctgaagaggggaagaagctggaacactttaccaagttaaggccaaaaaggaataagaagcagcaacccacccaagcagcggtctgtgctgccaacatagtctcacaagatggtgaacagaatggtctcatggggagagtggatgaaggtgtagatgaattttttaccaagaaggtgaccaaaatggattccaagaaatggtcaacaagaggctcagagtcccatgagcttaatgaaggaggagatgaaaagaaaaagcgagattctcggaaaagtagtggctttctcaatttaatcaaatcccggtccaaatccgagcgaccaccaacgatcttgatgacagaagaaccctcctcaccaaaaggggcagtcagaagtccacctgtggactgtcccaggaaggacacaaaggccgccgagcacaatggcaattctgaacggatagaggagataaaaacacctgactcctttgaagagagtcaaggggaagaaatagggaaggtggaacggagtgacagcaagagcagcccacaggcagggcggaggtatggggtccaggtgatgggcagtggtctgctggcagagatgaaagccaagcaagagaagagagctgcgtgtgcgcagaagaagcttgggaatgatgccgtatcccaggattcttccagcccagctttgagcggcgtagaacggtcggatggaggtggggcagtgcctaaactgcacccaggtcttccagagaaccgctttggtttgggaacaccagaaaagaataccaaagcagaacccaaagcggaagcaggctccaggtctcggagctcatccagcacacctacgagcccgaagcccctcctgcagtcccccaaacccagtctggcagcacggcccgtcatcccgcagaaaccaagaaccgcctcacggcctgatgacattccagactctccatctagcccgaaagttgcccttcttccacctgtcctgaaaaaagttccttcagacaaagagagagatggccagagtagcccccagcccagccccaggacattttcacaggaagtttcaaggagaagctggggccagcaggcccaggagtatcaagaacaaaagcaacggtcctccagtaaagatggccatcaaggcagcaaatctaatgactccggggaagaagcagaaaaagagtttatttttgtgtaa

SEQ ID NO: 98 - DNA, 1491 bp, Homo sapiens
  source 1..1491: mol_type = unassigned DNA
atggacttcagcagaaatctttatgatattggggaacaactggacagtgaagatctggcctccctcaagttcctgagcctggactacattccgcaaaggaagcaagaacccatcaaggatgccttgatgttattccagagactccaggaaaagagaatgttggaggaaagcaatctgtccttcctgaaggagctgctcttccgaattaatagactggatttgctgattacctacctaaacactagaaaggaggagatggaaagggaacttcagacaccaggcagggctcaaatttctgcctacaggttccacttctgccgcatgagctgggctgaagcaaacagccagtgccagacacagtctgtacctttctggcggagggtcgatcatctattaataagggtcatgctctatcagatttcagaagaagtgagcagatcagaattgaggtcttttaagtttcttttgcaagaggaaatctccaaatgcaaactggatgatgacatgaacctgctggatattttcatagagatggagaagagggtcatcctgggagaaggaaagttggacatcctgaaaagagtctgtgcccaaatcaacaagagcctgctgaagataatcaacgactatgaagaattcagcaaaggggaggagttgtgtggggtaatgacaatctcggactctccaagagaacaggatagtgaatcacagactttggacaaagtttaccaaatgaaaagcaaacctcggggatactgtctgatcatcaacaatcacaattttgcaaaagcacgggagaaagtgcccaaacttcacagcattagggacaggaatggaacacacttggatgcaggggctttgaccacgacctttgaagagcttcattttgagatcaagccccacgatgactgcacagtagagcaaatctatgagattttgaaaatctaccaactcatggaccacagtaacatggactgcttcatctgctgtatcctctcccatggagacaagggcatcatctatggcactgatggacaggaggcccccatctatgagctgacatctcagttcactggtttgaagtgcccttcccttgctggaaaacccaaagtgttttttattcaggcttgtcagggggataactaccagaaaggtatacctgttgagactgattcagaggagcaaccctatttagaaatggatttatcatcacctcaaacgagatatatcccggatgaggctgactttctgctggggatggccactgtgaataactgtgtttcctaccgaaaccctgcagagggaacctggtacatccagtcactttgccagagcctgagagagcgatgtcctcgaggcgatgatattctcaccatcctgactgaagtgaactatgaagtaagcaacaaggatgacaagaaaaacatggggaaacagatgcctcagcctactttcacactaagaaaaaaacttgtcttcccttctgattga

SEQ ID NO: 99 - DNA, 5160 bp, Homo sapiens
  source 1..5160: mol_type = unassigned DNA
atgtctggagaagtgcgtttgaggcagttggagcagtttattttggacgggcccgctcagaccaatgggcagtgcttcagtgtggagacattactggatatactcatctgcctttatgatgaatgcaataattctccattgagaagagagaagaacattctcgaatacctagaatgggctaaaccatttacttctaaagtgaaacaaatgcgattacatagagaagactttgaaatattaaaggtgattggtcgaggagcttttggggaggttgctgtagtaaaactaaaaaatgcagataaagtgtttgccatgaaaatattgaataaatgggaaatgctgaaaagagctgagacagcatgttttcgtgaagaaagggatgtattagtgaatggagacaataaatggattacaaccttgcactatgctttccaggatgacaataacttatacctggttatggattattatgttggtggggatttgcttactctactcagcaaatttgaagatagattgcctgaagatatggctagattttacttggctgagatggtgatagcaattgactcagttcatcagctacattatgtacacagagacattaaacctgacaatatactgatggatatgaatggacatattcggttagcagattttggttcttgtctgaagctgatggaagatggaacggttcagtcctcagtggctgtaggaactccagattatatctctcctgaaatccttcaagccatggaagatggaaaagggagatatggacctgaatgtgactggtggtctttgggggtctgtatgtatgaaatgctttacggagaaacaccattttatgcagaatcgctggtggagacatacggaaaaatcatgaaccacaaagagaggtttcagtttccagcccaagtgactgatgtgtctgaaaatgctaaggatcttattcgaaggctcatttgtagcagagaacatcgacttggtcaaaatggaatagaagactttaagaaacacccatttttcagtggaattgattgggataatattcggaactgtgaagcaccttatattccagaagttagtagcccaacagatacatcgaattttgatgtagatgatgattgtttaaaaaattctgaaacgatgcccccaccaacacatactgcattttctggccaccatctgccatttgttggttttacatatactagtagctgtgtactttctgatcggagctgtttaagagttacggctggtcccacctcactggatcttgatgttaatgttcagaggactctagacaacaacttagcaactgaagcttatgaaagaagaattaagcgccttgagcaagaaaaacttgaactcagtagaaaacttcaagagtcaacacagactgtccaagctctgcagtattcaactgttgatggtccactaacagcaagcaaagatttagaaataaaaaacttaaaagaagaaattgaaaaactaagaaaacaagtaacagaatcaagtcatttggaacagcaacttgaagaagctaatgctgtgaggcaagaactagatgatgcttttagacaaatcaaggcttatgaaaaacaaatcaaaacgttacaacaagaaagagaagatctaaataaggaactagtccaggctagtgagcgattaaaaaaccaatccaaagagctgaaagacgcacactgtcagaggaaactggccatgcaggaattcatggagatcaatgagcggctaacagaattgcacacccaaaaacagaaacttgctcgccatgtccgagataaggaagaagaggtggacctggtgatgcaaaaagttgaaagcttaaggcaagaactgcgcagaacagaaagagccaaaaaagagctggaagttcatacagaagctctagctgctgaagcatctaaagacaggaagctacgtgaacagagtgagcactattctaagcaactggaaaatgaattggagggactgaagcaaaaacaaattagttactcaccaggagtatgcagcatagaacatcagcaagagataaccaaactaaagactgatttggaaaagaaaagtatcttttatgaagaagaattatctaaaagagaaggaatacatgcaaatgaaataaaaaatcttaagaaagaactgcatgattcagaaggtcagcaacttgctctcaacaaagaaattatgattttaaaagacaaattggaaaaaaccagaagagaaagtcaaagtgaaagggaggaatttgaaagtgagttcaaacaacaatatgaacgagaaaaagtgttgttaactgaagaaaataaaaagctgacgagtgaacttgataagcttactactttgtatgagaacttaagtatacacaaccagcagttagaagaagaggttaaagatctagcagacaagaaagaatcagttgcacattgggaagcccaaatcacagaaataattcagtgggtcagcgatgaaaaggatgcacgagggtatcttcaggccttagcttctaaaatgactgaagaattggaggcattaagaaattccagcttgggtacacgagcaacagatatgccctggaaaatgcgtcgttttgcgaaactggatatgtcagctagactggagttgcagtcggctctggatgcagaaataagagccaaacaggccatccaagaagagttgaataaagttaaagcatctaatatcataacagaatgtaaactaaaagattcagagaagaagaacttggaactactctcagaaatcgaacagctgataaaggacactgaagagcttagatctgaaaagggtatagagcaccaagactcacagcattctttcttggcatttttgaatacgcctaccgatgctctggatcaatttgaaactgtagactccactccactttcagttcacacaccaaccttaaggaaaaaaggatgtcctggttcaactggctttccacctaagcgcaagactcaccagttttttgtaaaatcttttactactcctaccaagtgtcatcagtgtacctccttgatggtgggtttaataagacagggctgttcatgtgaagtgtgtggattctcatgccatataacttgtgtaaacaaagctccaaccacttgtccagttcctcctgaacagacaaaaggtcccctgggtatagatcctcagaaaggaataggaacagcatatgaaggtcatgtcaggattcctaagccagctggagtgaagaaagggtggcagagagcactggctatagtgtgtgacttcaaactctttctgtacgatattgctgaaggaaaagcatctcagcccagtgttgtcattagtcaagtgattgacatgagggatgaagaattttctgtgagttcagtcttggcttctgatgttatccatgcaagtcggaaagatataccctgtatatttagggtcacagcttcccagctctcagcatctaataacaaatgttcaatcctgatgctagcagacactgagaatgagaagaataagtgggtgggagtgctgagtgaattgcacaagattttgaagaaaaacaaattcagagaccgctcagtctatgttcccaaagaggcttatgacagcactctacccctcattaaaacaacccaggcagccgcaatcatagatcatgaaagaattgctttgggaaacgaagaagggttatttgttgtacatgtcaccaaagatgaaattattagagttggtgacaataagaagattcatcagattgaactcattccaaatgatcagcttgttgctgtgatctcaggacgaaatcgtcatgtacgactttttcctatgtcagcattggatgggcgagagaccgatttttacaagctgtcagaaactaaagggtgtcaaaccgtaacttctggaaaggtgcgccatggagctctcacatgcctgtgtgtggctatgaaaaggcaggtcctctgttatgaactatttcagagcaagacccgtcacagaaaatttaaagaaattcaagtcccatataatgtccagtggatggcaatcttcagtgaacaactctgtgtgggattccagtcaggatttctaagataccccttgaatggagaaggaaatccatacagtatgctccattcaaatgaccatacactatcatttattgcacatcaaccaatggatgctatctgcgcagttgagatctccagtaaagaatatctgctgtgttttaacagcattgggatatacactgactgccagggccgaagatctagacaacaggaattgatgtggccagcaaatccttcctcttgttgttacaatgcaccatatctctcggtgtacagtgaaaatgcagttgatatctttgatgtgaactccatggaatggattcagactcttcctctcaaaaaggttcgacccttaaacaatgaaggatcattaaatcttttagggttggagaccattagattaatatatttcaaaaataagatggcagaaggggacgaactggtagtacctgaaacatcagataatagtcggaaacaaatggttagaaacattaacaataagcggcgttattccttcagagtcccagaagaggaaaggatgcagcagaggagggaaatgctacgagatccagaaatgagaaataaattaatttctaatccaactaattttaatcacatagcacacatgggtcctggagatggaatacagatcctgaaagatctgcccatgaaccctcggcctcaggaaagtcggacagtattcagtggctcagtcagtattccatctatcaccaaatcccgccctgagccaggccgctccatgagtgctagcagtggcttgtcagcaaggtcatccgcacagaatggcagcgcattaaagagggaattctctggaggaagctacagtgccaagcggcagcccatgccctccccgtcagagggctctttgtcctctggaggcatggaccaaggaagtgatgccccagcgagggactttgacggagaggactctgactctccgaggcattccacagcttccaacagttccaacctaagcagccccccaagcccagcttcaccccgaaaaaccaagagcctctccctggagagcactgaccgcgggagctgggacccgtga

SEQ ID NO: 100 - DNA, 558 bp, Homo sapiens
  source 1..558: mol_type = unassigned DNA
atggggcaatgcttgaggtatcagatgcactgggaggacctggaagagtaccaggccctgaccttcctgaccagaaatgaaattctgtgcatccatgacaccttcctgaagctctgccctcctgggaagtactacaaggaggcaacgctcaccatggaccaggtcagctccctgccagctctgcgggtcaaccctttcagagaccgtatctgcagagtgttctcccacaaaggcatgttctcctttgaggatgtgctgggcatggcatctgtgttcagcgagcaggcctgcccaagcctgaagattgagtatgcctttcgcatctatgattttaatgagaatggcttcattgatgaggaggatctgcagaggatcatcctgcgactgctgaacagtgatgacatgtctgaggacctcctgatggacctcacgaaccacgtcctgagtgagtcggatctggacaatgacaacatgctgtccttctcagagtttgaacatgcaatggccaagtctccagatttcatgaactcctttcggattcacttctggggatgctga

SEQ ID NO: 101 - DNA, 3921 bp, Homo sapiens
  source 1..3921: mol_type = unassigned DNA
atggattctttaccacggctgaccagcgttttgactttgctgttctctggcttgtggcatttaggattaacagcgacaaactacaactgtgatgatccactagcatccctgctctctccaatggctttttccagttcctcagacctcactggcactcacagcccagctcaactcaactggagagttggaactggcggttggtccccagcagattccaatgctcaacagtggctccagatggacctgggaaacagagtagagattacagcagtggccacgcagggaagatacggaagctctgactgggtgacgagttacagcctgatgttcagtgacacaggacgcaactggaaacagtacaaacaagaagacagcatctggacctttgcaggaaacatgaatgctgacagcgtggtgcaccacaagctattgcactcagtgagagcccgatttgttcgctttgtgcccctggaatggaatcccagtgggaagattggcatgagagtcgaggtctacggatgttcctataaatcagatgttgctgactttgatggccgaagctcacttctgtacaggttcaatcagaagttgatgagtactctcaaagatgtgatctccctgaagttcaagagcatgcaaggagatggggtcctgttccatggagaaggtcagcgtggagaccacatcaccttggaactccagaaggggaggctcgccctacacctcaatttgggtgacagcaaagcgcggctcagcagcagcttgccctctgccaccctgggcagcctcctggatgaccagcactggcactcggtcctcattgagcgggtgggcaagcaggtgaacttcacggtggacaagcacacacagcacttccgcaccaagggcgagacggatgccttagacattgactatgagcttagttttggaggaattccagtaccaggaaaacctgggacctttttaaagaaaaacttccatggatgcatcgaaaacctttactacaatggagtaaacataattgacctggctaagagacgaaagcatcagatctatactggcaatgtcactttttcctgctccgaaccacagattgtgcccatcacatttgtcaactccagcggcagctatttgctgctgcccggcaccccccaaattgatgggctctcagtgagtttccagtttcgaacatggaacaaggatggtctgcttctgtccacagagctgtctgagggctcgggaaccctgctgctgagcctggagggtggaatcctgagactcgtgattcagaaaatgacagaacgcgtagctgaaatcctcacaggcagcaacttgaatgatggcctgtggcactcggttagcatcaacgccaggaggaaccgcatcacgctcactctggatgatgaagcagcacccccggctccagacagcacttgggtgcagatttattctggaaatagctactattttggagggtgccccgacaatctcaccgattcccaatgtttaaatcccattaaggctttccaaggctgcatgaggctcatctttattgataaccagcccaaggacctcatttcagttcagcaaggttccctggggaattttagtgatttacacattgatctgtgtagcatcaaagacaggtgtttgccaaactactgtgaacatggaggaagctgctcccagtcctggactaccttctattgtaactgcagtgacacaagttacactggtgccacctgccacaactccatctacgagcaatcctgcgaggtgtacaggcaccaggggaatacagccggcttcttctacatcgactcagatggcagcggcccactgggacctctccaggtgtactgcaatatcactgaggacaagatctggacatcagtgcagcacaacaatacagagctgacccgagtgcggggcgctaaccctgagaagccctatgccatggccttggactacgggggcagcatggaacagctggaggccgtgatcgacggctctgagcactgtgagcaggaggtggcctaccactgcaggaggtcccgcctgctcaacacgccggatggaacaccatttacctggtggattgggcggtccaatgaaaggcacccttactggggaggttcccctcctggggtccagcagtgtgagtgtggcctagacgagagctgcctggacattcagcacttttgcaattgcgacgctgacaaggatgaatggacaaatgatactggctttctttccttcaaagaccacttgcctgtcactcagatagttatcactgataccgacagatcaaactcagaagccgcttggagaattggtcccttgcgttgctatggtgaccgacgcttctggaacgccgtctcattttatacagaagcctcttacctccactttcctaccttccatgcggaattcagtgccgatatttccttcttttttaaaaccacagcattatccggagttttcctagaaaatcttggcattaaagacttcattcgactcgaaataagctctccttcagagatcacctttgccatcgatgttgggaatggtcctgtggagcttgtagtccagtctccttctcttctgaatgacaaccaatggcactatgtccgggctgagaggaacctcaaggagacctccctgcaggtggacaaccttccaaggagcaccagggagacgtcggaggagggccattttcgactgcagctgaacagccagttgtttgtagggggaacgtcatccagacagaaaggcttcctaggatgcattcgctccttacacttgaatggacagaaaatggacctggaagagagggcaaaggtcacatctggagtcaggccaggctgccccggccactgcagcagctacggcagcatctgccacaacgggggcaagtgtgtggagaagcacaatggctacctgtgtgattgcaccaattcaccttatgaagggcccttttgcaaaaaagaggtttctgctgtttttgaggctggcacgtcggttacttacatgtttcaagaaccctatcctgtgaccaagaatataagcctctcatcctcagctatttacacagattcagctccatccaaggaaaacattgcacttagctttgtgacaacccaggcacccagtcttttgctctttatcaattcttcttctcaggacttcgtggttgttctgctctgcaagaatggaagcttacaggttcgctatcacctaaacaaggaagaaacccatgtattcaccattgatgcagataactttgctaacagaaggatgcaccacttgaagattaaccgagagggaagagagcttaccattcagatggaccagcaacttcgactcagttataacttctctccggaagtagagttcagggttataaggtcactcaccttgggcaaagtcacagagaatcttggtttggattctgaagttgctaaagcaaatgccatgggttttgctggatgcatgtcttccgtccagtacaaccacatagcaccactgaaggctgccctgcgccatgccactgtcgcgcctgtgactgtccatgggaccttgacggaatccagctgtggcttcatggtggactcagatgtgaatgcagtgaccacggtgcattcttcatcagatccttttgggaagacagatgagcgggaaccactcacaaatgctgttcgaagtgattcggcagtcatcggaggggtgatagcagtggtgatattcatcatcttctgtatcatcggcatcatgacccggttcctctaccagcacaagcagtcacatcgtacgagccagatgaaggagaaggaatatccagaaaatttggacagttccttcagaaatgaaattgacttgcaaaacacagtgagcgagtgtaaacgggaatatttcatctga

SEQ ID NO: 102 - skipped

SEQ ID NO: 103 - DNA, 4401 bp, Homo sapiens
  source 1..4401: mol_type = unassigned DNA
atgatgagctttgtgcaaaaggggagctggctacttctcgctctgcttcatcccactattattttggcacaacaggaagctgttgaaggaggatgttcccatcttggtcagtcctatgcggatagagatgtctggaagccagaaccatgccaaatatgtgtctgtgactcaggatccgttctctgcgatgacataatatgtgacgatcaagaattagactgccccaacccagaaattccatttggagaatgttgtgcagtttgcccacagcctccaactgctcctactcgccctcctaatggtcaaggacctcaaggccccaagggagatccaggccctcctggtattcctgggagaaatggtgaccctggtattccaggacaaccagggtcccctggttctcctggcccccctggaatctgtgaatcatgccctactggtcctcagaactattctccccagtatgattcatatgatgtcaagtctggagtagcagtaggaggactcgcaggctatcctggaccagctggccccccaggccctcccggtccccctggtacatctggtcatcctggttcccctggatctccaggataccaaggaccccctggtgaacctgggcaagctggtccttcaggccctccaggacctcctggtgctataggtccatctggtcctgctggaaaagatggagaatcaggtagacccggacgacctggagagcgaggattgcctggacctccaggtatcaaaggtccagctgggatacctggattccctggtatgaaaggacacagaggcttcgatggacgaaatggagaaaagggtgaaacaggtgctcctggattaaagggtgaaaatggtcttccaggcgaaaatggagctcctggacccatgggtccaagaggggctcctggtgagcgaggacggccaggacttcctggggctgcaggtgctcggggtaatgacggtgctcgaggcagtgatggtcaaccaggccctcctggtcctcctggaactgccggattccctggatcccctggtgctaagggtgaagttggacctgcagggtctcctggttcaaatggtgcccctggacaaagaggagaacctggacctcagggacacgctggtgctcaaggtcctcctggccctcctgggattaatggtagtcctggtggtaaaggcgaaatgggtcccgctggcattcctggagctcctggactgatgggagcccggggtcctccaggaccagccggtgctaatggtgctcctggactgcgaggtggtgcaggtgagcctggtaagaatggtgccaaaggagagcccggaccacgtggtgaacgcggtgaggctggtattccaggtgttccaggagctaaaggcgaagatggcaaggatggatcacctggagaacctggtgcaaatgggcttccaggagctgcaggagaaaggggtgcccctgggttccgaggacctgctggaccaaatggcatcccaggagaaaagggtcctgctggagagcgtggtgctccaggccctgcagggcccagaggagctgctggagaacctggcagagatggcgtccctggaggtccaggaatgaggggcatgcccggaagtccaggaggaccaggaagtgatgggaaaccagggcctcccggaagtcaaggagaaagtggtcgaccaggtcctcctgggccatctggtccccgaggtcagcctggtgtcatgggcttccccggtcctaaaggaaatgatggtgctcctggtaagaatggagaacgaggtggccctggaggacctggccctcagggtcctcctggaaagaatggtgaaactggacctcagggacccccagggcctactgggcctggtggtgacaaaggagacacaggaccccctggtccacaaggattacaaggcttgcctggtacaggtggtcctccaggagaaaatggaaaacctggggaaccaggtccaaagggtgatgccggtgcacctggagctccaggaggcaagggtgatgctggtgcccctggtgaacgtggacctcctggattggcaggggccccaggacttagaggtggagctggtccccctggtcccgaaggaggaaagggtgctgctggtcctcctgggccacctggtgctgctggtactcctggtctgcaaggaatgcctggagaaagaggaggtcttggaagtcctggtccaaagggtgacaagggtgaaccaggcggtccaggtgctgatggtgtcccagggaaagatggcccaaggggtcctactggtcctattggtcctcctggcccagctggccagcctggagataagggtgaaggtggtgcccccggacttccaggtatagctggacctcgtggtagccctggtgagagaggtgaaactggccctccaggacctgctggtttccctggtgctcctggacagaatggtgaacctggtggtaaaggagaaagaggggctccgggtgagaaaggtgaaggaggccctcctggagttgcaggaccccctggaggttctggacctgctggtcctcctggtccccaaggtgtcaaaggtgaacgtggcagtcctggtggacctggtgctgctggcttccctggtgctcgtggtcttcctggtcctcctggtagtaatggtaacccaggacccccaggtcccagcggttctccaggcaaggatgggcccccaggtcctgcgggtaacactggtgctcctggcagccctggagtgtctggaccaaaaggtgatgctggccaaccaggagagaagggatcgcctggtgcccagggcccaccaggagctccaggcccacttgggattgctgggatcactggagcacggggtcttgcaggaccaccaggcatgccaggtcctaggggaagccctggccctcagggtgtcaagggtgaaagtgggaaaccaggagctaacggtctcagtggagaacgtggtccccctggaccccagggtcttcctggtctggctggtacagctggtgaacctggaagagatggaaaccctggatcagatggtcttccaggccgagatggatctcctggtggcaagggtgatcgtggtgaaaatggctctcctggtgcccctggcgctcctggtcatccaggcccacctggtcctgtcggtccagctggaaagagtggtgacagaggagaaagtggccctgctggccctgctggtgctcccggtcctgctggttcccgaggtgctcctggtcctcaaggcccacgtggtgacaaaggtgaaacaggtgaacgtggagctgctggcatcaaaggacatcgaggattccctggtaatccaggtgccccaggttctccaggccctgctggtcagcagggtgcaatcggcagtccaggacctgcaggccccagaggacctgttggacccagtggacctcctggcaaagatggaaccagtggacatccaggtcccattggaccaccagggcctcgaggtaacagaggtgaaagaggatctgagggctccccaggccacccagggcaaccaggccctcctggacctcctggtgcccctggtccttgctgtggtggtgttggagccgctgccattgctgggattggaggtgaaaaagctggcggttttgccccgtattatggagatgaaccaatggatttcaaaatcaacaccgatgagattatgacttcactcaagtctgttaatggacaaatagaaagcctcattagtcctgatggttctcgtaaaaaccccgctagaaactgcagagacctgaaattctgccatcctgaactcaagagtggagaatactgggttgaccctaaccaaggatgcaaattggatgctatcaaggtattctgtaatatggaaactggggaaacatgcataagtgccaatcctttgaatgttccacggaaacactggtggacagattctagtgctgagaagaaacacgtttggtttggagagtccatggatggtggttttcagtttagctacggcaatcctgaacttcctgaagatgtccttgatgtgcatctggcattccttcgacttctctccagccgagcttcccagaacatcacatatcactgcaaaaatagcattgcatacatggatcaggccagtggaaatgtaaagaaggccctgaagctgatggggtcaaatgaaggtgaattcaaggctgaaggaaatagcaaattcacctacacagttctggaggatggttgcacgaaacacactggggaatggagcaaaacagtctttgaatatcgaacacgcaaggctgtgagactacctattgtagatattgcaccctatgacattggtggtcctgatcaagaatttggtgtggacgttggccctgtttgctttttataa

SEQ ID NO: 104 - DNA, 1419 bp, Homo sapiens
  source 1..1419: mol_type = unassigned DNA
atgaaattccttatcttcgcatttttcggtggtgttcaccttttatccctgtgctctgggaaagctatatgcaagaatggcatctctaagaggacttttgaagaaataaaagaagaaatagccagctgtggagatgttgctaaagcaatcatcaacctagctgtttatggtaaagcccagaacagatcctatgagcgattggcacttctggttgatactgttggacccagactgagtggctccaagaacctagaaaaagccatccaaattatgtaccaaaacctgcagcaagatgggctggagaaagttcacctggagccagtgagaataccccactgggagaggggagaagaatcagctgtgatgctggagccaagaattcataagatagccatcctgggtcttggcagcagcattgggactcctccagaaggcattacagcagaagttctggtggtgacctctttcgatgaactgcagagaagggcctcagaagcaagagggaagattgttgtttataaccaaccttacatcaactactcaaggacggtgcaataccgaacgcagggggcggtggaagctgccaaggtgggggctttggcatctctcattcgatccgtggcctccttctccatctacagtcctcacacaggtattcaggaataccaggatggcgtgcccaagattccaacagcctgtattacggtggaagatgcagaaatgatgtcaagaatggcttctcatgggatcaaaattgtcattcagctaaagatgggggcaaagacctacccagatactgattccttcaacactgtagcagagatcactgggagcaaatatccagaacaggttgtactggtcagtggacatctggacagctgggatgttgggcagggtgccatggatgatggcggtggagcctttatatcatgggaagcactctcacttattaaagatcttgggctgcgtccaaagaggactctgcggctggtgctctggactgcagaagaacaaggtggagttggtgccttccagtattatcagttacacaaggtaaatatttccaactacagtctggtgatggagtctgacgcaggaaccttcttacccactgggctgcaattcactggcagtgaaaaggccagggccatcatggaggaggttatgagcctgctgcagcccctcaatatcactcaggtcctgagccatggagaagggacagacatcaacttttggatccaagctggagtgcctggagccagtctacttgatgacttatacaagtatttcttcttccatcactcccacggagacaccatgactgtcatggatccaaagcagatgaatgttgctgctgctgtttgggctgttgtttcttatgttgttgcagacatggaagaaatgctgcctaggtcctag

SEQ ID NO: 105 - DNA, 1545 bp, Homo sapiens
  source 1..1545: mol_type = unassigned DNA
atgggacggccggagtctgcgggcggagggagtcgcgggccttttgagggaggaggcagagcgcgccgggccggtggcatcttccttactttgtccatcctccggactcgcgatcttccttccggagccatgtcagaaggagtggacttgattgatatatatgctgacgaggagttcaaccaggacccagagttcaacaatacagatcagattgacctgtatgatgatgtgctgacagccacctcacagccctcagatgacagaagcagcagcactgaaccacctcctcctgttcgccaggagccatctcccaagcccaacaacaagacccctgcaattctgtatacctacagtggcctgcgtaatagacgagctgccgtttatgtgggcagcttctcctggtggaccacagaccagcagctgatccaggttattcgctctataggagtctatgatgtggtggagttgaaatttgcagagaatcgagcaaatggccagtccaaagggtatgctgaggtggtggtagcctctgaaaactctgtccacaaattgttggaactcctaccagggaaagttcttaatggagaaaaagtggacgtgaggccggccacccggcagaacctgtcacagtttgaggcacaggctcggaaacgtgagtgtgtccgagtcccaagagggggaatacctccacgggcccattcccgagattctagtgattctgctgatggacgggccacaccctctgagaaccttgtaccctcatctgctcgtgtggataagccccccagtgtgctgccctacttcaatcgtcctccttcggcccttcccctgatgggtctgcccccaccaccaattccacccccaccacctctctcctcaagctttggggtccctcctcctcctcctggtatccactaccagcatctcatgcccccacctcctcgattacctcctcatcttgctgtacctccccctggggccatcccacctgcccttcacctcaatccagccttcttccccccaccaaacgctacagtggggcctccaccagatacttacatgaaggcctctgccccctataaccaccatggcagccgagattcgggccctccaccctctacagtgagtgaagccgaatttgaagatatcatgaagcgaaacagagcaatttccagcagtgccatttccaaagcagtatctggagccagtgcaggggattacagtgacgcaattgagacgctgctcacagccattgcggttatcaaacagtcccgggttgccaatgatgagcgttgccgtgtcctcatctcctctcttaaggactgtcttcatggcatcgaagccaagtcctacagtgtgggtgccagtgggagctcttccaggaaaagacatcgctcccgggaaaggtcacctagccggtcccgggagagcagcaggaggcaccgggatctgcttcataatgaagatcggcatgatgattatttccaagaaaggaaccgggagcatgagagacaccgggatagagaacgggaccggcaccactga

SEQ ID NO: 106 - DNA, 7329 bp, Homo sapiens
  source 1..7329: mol_type = unassigned DNA
atggctgagaacttgctggacggaccgcccaaccccaaaagagccaaactcagctcgcccggtttctcggcgaatgacagcacagattttggatcattgtttgacttggaaaatgatcttcctgatgagctgatacccaatggaggagaattaggccttttaaacagtgggaaccttgttccagatgctgcttccaaacataaacaactgtcggagcttctacgaggaggcagcggctctagtatcaacccaggaataggaaatgtgagcgccagcagccccgtgcagcagggcctgggtggccaggctcaagggcagccgaacagtgctaacatggccagcctcagtgccatgggcaagagccctctgagccagggagattcttcagcccccagcctgcctaaacaggcagccagcacctctgggcccacccccgctgcctcccaagcactgaatccgcaagcacaaaagcaagtggggctggcgactagcagccctgccacgtcacagactggacctggtatctgcatgaatgctaactttaaccagacccacccaggcctcctcaatagtaactctggccatagcttaattaatcaggcttcacaagggcaggcgcaagtcatgaatggatctcttggggctgctggcagaggaaggggagctggaatgccgtaccctactccagccatgcagggcgcctcgagcagcgtgctggctgagaccctaacgcaggtttccccgcaaatgactggtcacgcgggactgaacaccgcacaggcaggaggcatggccaagatgggaataactgggaacacaagtccatttggacagccctttagtcaagctggagggcagccaatgggagccactggagtgaacccccagttagccagcaaacagagcatggtcaacagtttgcccaccttccctacagatatcaagaatacttcagtcaccaacgtgccaaatatgtctcagatgcaaacatcagtgggaattgtacccacacaagcaattgcaacaggccccactgcagatcctgaaaaacgcaaactgatacagcagcagctggttctactgcttcatgctcataagtgtcagagacgagagcaagcaaacggagaggttcgggcctgctcgctcccgcattgtcgaaccatgaaaaacgttttgaatcacatgacgcattgtcaggctgggaaagcctgccaagttgcccattgtgcatcttcacgacaaatcatctctcattggaagaactgcacacgacatgactgtcctgtttgcctccctttgaaaaatgccagtgacaagcgaaaccaacaaaccatcctggggtctccagctagtggaattcaaaacacaattggttctgttggcacagggcaacagaatgccacttctttaagtaacccaaatcccatagaccccagctccatgcagcgagcctatgctgctctcggactcccctacatgaaccagccccagacgcagctgcagcctcaggttcctggccagcaaccagcacagcctcaaacccaccagcagatgaggactctcaaccccctgggaaataatccaatgaacattccagcaggaggaataacaacagatcagcagcccccaaacttgatttcagaatcagctcttccgacttccctgggggccacaaacccactgatgaacgatggctccaactctggtaacattggaaccctcagcactataccaacagcagctcctccttctagcaccggtgtaaggaaaggctggcacgaacatgtcactcaggacctgcggagccatctagtgcataaactcgtccaagccatcttcccaacacctgatcccgcagctctaaaggatcgccgcatggaaaacctggtagcctatgctaagaaagtggaaggggacatgtacgagtctgccaacagcagggatgaatattatcacttattagcagagaaaatctacaagatacaaaaagaactagaagaaaaacggaggtcgcgtttacataaacaaggcatcttggggaaccagccagccttaccagccccgggggctcagccccctgtgattccacaggcacaacctgtgagacctccaaatggacccctgtccctgccagtgaatcgcatgcaagtttctcaagggatgaattcatttaaccccatgtccttggggaacgtccagttgccacaagcacccatgggacctcgtgcagcctccccaatgaaccactctgtccagatgaacagcatgggctcagtgccagggatggccatttctccttcccgaatgcctcagcctccgaacatgatgggtgcacacaccaacaacatgatggcccaggcgcccgctcagagccagtttctgccacagaaccagttcccgtcatccagcggggcgatgagtgtgggcatggggcagccgccagcccaaacaggcgtgtcacagggacaggtgcctggtgctgctcttcctaaccctctcaacatgctggggcctcaggccagccagctaccttgccctccagtgacacagtcaccactgcacccaacaccgcctcctgcttccacggctgctggcatgccatctctccagcacacgacaccacctgggatgactcctccccagccagcagctcccactcagccatcaactcctgtgtcgtcttccgggcagactcccaccccgactcctggctcagtgcccagtgctacccaaacccagagcacccctacagtccaggcagcagcccaggcccaggtgaccccgcagcctcaaaccccagttcagcccccgtctgtggctacccctcagtcatcgcagcaacagccgacgcctgtgcacgcccagcctcctggcacaccgctttcccaggcagcagccagcattgataacagagtccctaccccctcctcggtggccagcgcagaaaccaattcccagcagccaggacctgacgtacctgtgctggaaatgaagacggagacccaagcagaggacactgagcccgatcctggtgaatccaaaggggagcccaggtctgagatgatggaggaggatttgcaaggagcttcccaagttaaagaagaaacagacatagcagagcagaaatcagaaccaatggaagtggatgaaaagaaacctgaagtgaaagtagaagttaaagaggaagaagagagtagcagtaacggcacagcctctcagtcaacatctccttcgcagccgcgcaaaaaaatctttaaaccagaggagttacgccaggccctcatgccaaccctagaagcactgtatcgacaggacccagagtcattacctttccggcagcctgtagatccccagctcctcggaattccagactattttgacatcgtaaagaatcccatggacctctccaccatcaagcggaagctggacacagggcaataccaagagccctggcagtacgtggacgacgtctggctcatgttcaacaatgcctggctctataatcgcaagacatcccgagtctataagttttgcagtaagcttgcagaggtctttgagcaggaaattgaccctgtcatgcagtcccttggatattgctgtggacgcaagtatgagttttccccacagactttgtgctgctatgggaagcagctgtgtaccattcctcgcgatgctgcctactacagctatcagaataggtatcatttctgtgagaagtgtttcacagagatccagggcgagaatgtgaccctgggtgacgacccttcacagccccagacgacaatttcaaaggatcagtttgaaaagaagaaaaatgataccttagaccccgaacctttcgttgattgcaaggagtgtggccggaagatgcatcagatttgcgttctgcactatgacatcatttggccttcaggttttgtgtgcgacaactgcttgaagaaaactggcagacctcgaaaagaaaacaaattcagtgctaagaggctgcagaccacaagactgggaaaccacttggaagaccgagtgaacaaatttttgcggcgccagaatcaccctgaagccggggaggtttttgtccgagtggtggccagctcagacaagacggtggaggtcaagcccgggatgaagtcacggtttgtggattctggggaaatgtctgaatctttcccatatcgaaccaaagctctgtttgcttttgaggaaattgacggcgtggatgtctgcttttttggaatgcacgtccaagaatacggctctgattgcccccctccaaacacgaggcgtgtgtacatttcttatctggatagtattcatttcttccggccacgttgcctccgcacagccgtttaccatgagatccttattggatatttagagtatgtgaagaaattagggtatgtgacagggcacatctgggcctgtcctccaagtgaaggagatgattacatcttccattgccacccacctgatcaaaaaatacccaagccaaaacgactgcaggagtggtacaaaaagatgctggacaaggcgtttgcagagcggatcatccatgactacaaggatattttcaaacaagcaactgaagacaggctcaccagtgccaaggaactgccctattttgaaggtgatttctggcccaatgtgttagaagagagcattaaggaactagaacaagaagaagaggagaggaaaaaggaagagagcactgcagccagtgaaaccactgagggcagtcagggcgacagcaagaatgccaagaagaagaacaacaagaaaaccaacaagaacaaaagcagcatcagccgcgccaacaagaagaagcccagcatgcccaacgtgtccaatgacctgtcccagaagctgtatgccaccatggagaagcacaaggaggtcttcttcgtgatccacctgcacgctgggcctgtcatcaacaccctgccccccatcgtcgaccccgaccccctgctcagctgtgacctcatggatgggcgcgacgccttcctcaccctcgccagagacaagcactgggagttctcctccttgcgccgctccaagtggtccacgctctgcatgctggtggagctgcacacccagggccaggaccgctttgtctacacctgcaacgagtgcaagcaccacgtggagacgcgctggcactgcactgtgtgcgaggactacgacctctgcatcaactgctataacacgaagagccatgcccataagatggtgaagtgggggctgggcctggatgacgagggcagcagccagggcgagccacagtcaaagagcccccaggagtcacgccggctgagcatccagcgctgcatccagtcgctggtgcacgcgtgccagtgccgcaacgccaactgctcgctgccatcctgccagaagatgaagcgggtggtgcagcacaccaagggctgcaaacgcaagaccaacgggggctgcccggtgtgcaagcagctcatcgccctctgctgctaccacgccaagcactgccaagaaaacaaatgccccgtgcccttctgcctcaacatcaaacacaagctccgccagcagcagatccagcaccgcctgcagcaggcccagctcatgcgccggcggatggccaccatgaacacccgcaacgtgcctcagcagagtctgccttctcctacctcagcaccgcccgggacccccacacagcagcccagcacaccccagacgccgcagccccctgcccagccccaaccctcacccgtgagcatgtcaccagctggcttccccagcgtggcccggactcagccccccaccacggtgtccacagggaagcctaccagccaggtgccggcccccccacccccggcccagccccctcctgcagcggtggaagcggctcggcagatcgagcgtgaggcccagcagcagcagcacctgtaccgggtgaacatcaacaacagcatgcccccaggacgcacgggcatggggaccccggggagccagatggcccccgtgagcctgaatgtgccccgacccaaccaggtgagcgggcccgtcatgcccagcatgcctcccgggcagtggcagcaggcgccccttccccagcagcagcccatgccaggcttgcccaggcctgtgatatccatgcaggcccaggcggccgtggctgggccccggatgcccagcgtgcagccacccaggagcatctcacccagcgctctgcaagacctgctgcggaccctgaagtcgcccagctcccctcagcagcaacagcaggtgctgaacattctcaaatcaaacccgcagctaatggcagctttcatcaaacagcgcacagccaagtacgtggccaatcagcccggcatgcagccccagcctggcctccagtcccagcccggcatgcaaccccagcctggcatgcaccagcagcccagcctgcagaacctgaatgccatgcaggctggcgtgccgcggcccggtgtgcctccacagcagcaggcgatgggaggcctgaacccccagggccaggccttgaacatcatgaacccaggacacaaccccaacatggcgagtatgaatccacagtaccgagaaatgttacggaggcagctgctgcagcagcagcagcaacagcagcagcaacaacagcagcaacagcagcagcagcaagggagtgccggcatggctgggggcatggcggggcacggccagttccagcagcctcaaggacccggaggctacccaccggccatgcagcagcagcagcgcatgcagcagcatctccccctccagggcagctccatgggccagatggcggctcagatgggacagcttggccagatggggcagccggggctgggggcagacagcacccccaacatccagcaagccctgcagcagcggattctgcagcaacagcagatgaagcagcagattgggtccccaggccagccgaaccccatgagcccccagcaacacatgctctcaggacagccacaggcctcgcatctccctggccagcagatcgccacgtcccttagtaaccaggtgcggtctccagcccctgtccagtctccacggccccagtcccagcctccacattccagcccgtcaccacggatacagccccagccttcgccacaccacgtctcaccccagactggttccccccaccccggactcgcagtcaccatggccagctccatagatcagggacacttggggaaccccgaacagagtgcaatgctcccccagctgaacacccccagcaggagtgcgctgtccagcgaactgtccctggtcggggacaccacgggggacacgctagagaagtttgtggagggcttgtag

SEQ ID NO: 107 - DNA, 1323 bp, Homo sapiens
  source 1..1323: mol_type = unassigned DNA
atgggcagctcgcacttgctcaacaagggcctgccgcttggcgtccgacctccgatcatgaacgggcccctgcacccgcggcccctggtggcattgctggatggccgggactgcacagtggagatgcccatcctgaaggacgtggccactgtggccttctgcgacgcgcagtccacgcaggagatccatgagaaggtcctgaacgaggctgtgggggccctgatgtaccacaccatcactctcaccagggaggacctggagaagttcaaagccctccgcatcatcgtccggattggcagtggttttgacaacatcgacatcaagtcggccggggatttaggcattgccgtctgcaacgtgcccgcggcgtctgtggaggagacggccgactcgacgctgtgccacatcctgaacctgtaccggcgggccacctggctgcaccaggcgctgcgggagggcacacgagtccagagcgtcgagcagatccgcgaggtggcgtccggcgctgccaggatccgcggggagaccttgggcatcatcggacttggtcgcgtggggcaggcagtggcgctgcgggccaaggccttcggcttcaacgtgctcttctacgacccttacttgtcggatggcgtggagcgggcgctggggctgcagcgtgtcagcaccctgcaggacctgctcttccacagcgactgcgtgaccctgcactgcggcctcaacgagcacaaccaccacctcatcaacgacttcaccgtcaagcagatgagacaaggggccttcctggtgaacacagcccggggtggcctggtggatgagaaggcgctggcccaggccctgaaggagggccggatccgcggcgcggccctggatgtgcacgagtcggaacccttcagctttagccagggccctctgaaggatgcacccaacctcatctgcaccccccatgctgcatggtacagcgagcaggcatccatcgagatgcgagaggaggcggcacgggagatccgcagagccatcacaggccggatcccagacagcctgaagaactgtgtcaacaaggaccatctgacagccgccacccactgggccagcatggaccccgccgtcgtgcaccctgagctcaatggggctgcctataggtaccctccgggcgtggtgggcgtggcccccactggcatcccagctgctgtggaaggtatcgtccccagcgccatgtccctgtcccacggcctgccccctgtggcccacccgccccacgccccttctcctggccaaaccgtcaagcccgaggcggatagagaccacgccagtgaccagttgtag

SEQ ID NO: 108 - DNA, 2826 bp, Homo sapiens
  source 1..2826: mol_type = unassigned DNA
atggacgactcagaggtggagtcgaccgccagcatcttggcctctgtgaaggaacaagaggcccagtttgagaagctgacccgggcgctggaggaggaacggcgccacgtctcggcgcagctggaacgcgtccgggtctcaccacaagatgccaacccactcatggccaacggcacactcacccgccggcatcagaacggccggtttgtgggcgatgctgaccttgaaagacagaaattttcagatttgaaactcaacggaccccaggatcacagtcaccttctatatagcaccatccccaggatgcaggagccggggcagattgtggagacctacacggaggaggatcctgagggagccatgtctgtagtctctgtggagacctcagatgatgggaccactcggcgcacagagaccacggtcaagaaagtagtgaagactgtgacaacacggacagtacagccagtcgctatgggaccagacgggttgcctgtggatgcttcatcagtttctaacaactatatccagactttgggtcgtgatttccgcaagaatggcaatgggggacctggtccctatgtggggcaagctggcactgctacccttcctaggaacttccactaccctcctgatggttatagtcgccactatgaagatggttatccaggtggcagtgataactatggcagtctgtcccgggtgacccgcattgaggagcggtataggcccagcatggaaggctaccgggcacctagtagacaggatgtgtatgggccccaaccccaggttcgggtaggtgggagcagcgtggatctgcatcgctttcatccagagccttatgggctagaggatgaccagcgtagtatgggctatgatgacctggattatggtatgatgtctgattatggcactgcccgtcggactgggacaccctctgaccctcgtcggcgcctcaggagctatgaagacatgattggtgaggaggtgccatcggatcaatactactgggctcctttggcccagcatgagcgaggaagtttagcaagcttggatagcctgcgcaaaggagggcctccacctcctaattggagacagccagagctgccagaggtgatcgccatgcttggattccgcttggatgctgtcaagtccaatgcagctgcatacctgcaacacttatgctaccgcaatgacaaggtgaagactgacgtgcggaagctcaagggcatcccagtactggtgggattgttagaccatcccaaaaaggaagtgcaccttggagcctgtggagctctcaagaatatctcttttggacgtgaccaggataacaagattgccataaaaaactgtgatggtgtgcctgcccttgtgcgattgcttcgaaaggctcgtgatatggaccttactgaagttattaccggaaccctgtggaatctttcatcccatgactcaatcaaaatggagattgtggaccatgcactgcatgccttgacagatgaagtgatcattcctcattctggttgggagcgggaacctaatgaagactgtaagccacgccacattgagtgggaatcggtgctcaccaacacagctggctgccttaggaatgtaagctcagagaggagtgaagctcgccggaaacttcgggaatgtgatggtttagttgatgccctcattttcattgttcaggctgagattgggcagaaggattcagacagcaagcttgtagagaactgtgtttgccttcttcggaacttatcatatcaagttcaccgggagatcccacaggcagagcgttaccaagaggcagctcccaatgttgccaacaatactgggccacatgctgccagttgctttggggccaagaagggcaaagggaaaaaacctatagaggatccagcaaacgatacagtggatttccctaaaagaacgagtccagctcgaggctatgagctcttatttcagccagaggtggttcggatatacatctcacttcttaaggagagcaagactcctgccatcctagaagcctcagctggagctatccagaacttgtgtgctgggcgctggacgtatggtcgatacatccgctctgctctgcgtcaagagaaggctctttctgccatagctgacctcctgactaatgaacatgaacgggtggtgaaagctgcatctggagcactgagaaacctggctgtggatgctcgcaacaaagaattaattggtaaacatgctattcctaacttggtaaagaatctgccaggaggacagcagaactcctcttggaatttctctgaggacactgtcatctctattttgaacactatcaacgaggttatcgctgagaacttggaggctgccaaaaagcttcgagagacacagggtattgagaagctggtgttgatcaacaaatcagggaaccgctcagaaaaagaagttcgagcagcagcacttgtattacagacaatctggggatataaggaactgcggaagccactggaaaaagaaggatggaagaaatcagactttcaggtgaatctaaacaatgcttcccgaagccagagcagtcattcatatgatgatagtactctccctctcattgaccggaaccaaaaatcagataacaactattccacaccaaatgagagaggagaccacaatagaacactggatcgatcgggggatctaggcgacatggagccattgaagggaacaacacccttgatgcaggacgaggggcaggaatctctggaggaagagttggatgtgttggttttggatgatgaggggggccaagtgtcttacccctccatgcagaagatttag

SEQ ID NO: 109 - DNA, 1530 bp, Homo sapiens
  source 1..1530: mol_type = unassigned DNA
atggcggcggcggctgggatgctgctgctgggcttgctgcaggcgggtgggtcggtgctgggccaggcgatggagaaggtgacaggcggcaacctcttgtccatgctgctgatcgcctgcgccttcaccctcagcctggtctacctgatccgtctggccgccggccacctggtccagctgcccgcaggggtgaaaagtcctccatacattttctccccaattccattccttgggcatgccatagcatttgggaaaagtccaattgaatttctagaaaatgcatatgagaagtatggacctgtatttagttttaccatggtaggcaagacatttacttaccttctggggagtgatgctgctgcactgctttttaatagtaaaaatgaagacctgaatgcagaagatgtctacagtcgcctgacaacacctgtgtttgggaagggagttgcatacgatgtgcctaatccagttttcttggagcagaagaaaatgttaaaaagtggccttaacatagcccactttaaacagcatgtttctataattgaaaaagaaacaaaggaatactttgagagttggggagaaagtggagaaaaaaatgtgtttgaagctctttctgagctcataattttaacagctagccattgtttgcatggaaaggaaatcagaagtcaactcaatgaaaaggtagcacagctgtatgcagatttggatggaggtttcagccatgcagcctggctcttaccaggttggctgcctttgcctagtttcagacgcagggacagagctcatcgggaaatcaaggatattttctataaggcaatccagaaacgcagacagtctcaagaaaaaattgatgacattctccaaactttactagatgctacatacaaggatgggcgtcctttgactgatgatgaagtagcagggatgcttattggattactcttggcagggcagcatacatcctcaactactagtgcttggatgggcttctttttggccagagacaaaacacttcaaaaaaaatgttatttagaacagaaaacagtctgtggagagaatctgcctcctttaacttatgaccagctcaaggatctaaatttacttgatcgctgtataaaagaaacattaagacttagacctcctataatgatcatgatgagaatggccagaactcctcagactgtggcagggtataccattcctccaggacatcaggtgtgtgtttctcccactgtcaatcaaagacttaaagactcatgggtagaacgcctggactttaatcctgatcgctacttacaggataacccagcatcaggggaaaagtttgcctatgtgccatttggagctgggcgtcatcgttgtattggggaaaattttgcctatgttcaaattaagacaatttggtccactatgcttcgtttatatgaatttgatctcattgatggatactttcccactgtgaattatacaactatgattcacacccctgaaaacccagttatccgttacaaacgaagatcaaaatga

SEQ ID NO: 110 - DNA, 477 bp, Homo sapiens
  source 1..477: mol_type = unassigned DNA
atgggcagcggcagcagccggagcagccggactctgaggcggcggcgcagccccgagagcctccccgcggggcccggagcggcagccctggagggcgggacccgccggcgggtgccggtggcggcggccgaggtcccgggggcagccgcggaggaggcgcccggccgcgaccccagccccgtggcgccccccgacggcagggacgagacgctgcgcctgctggacgagctgctggccgagtcggcggcctggggccccccggagcccgccccgcgccgcccagcccggctccgacccaccgcggtcgcggggagcgcggtgtgcgcagagcagagcacagagggccacccggggagcggcaatgtctctgaagccccaggcagcggtcgcaagaagcccgagaggccggcagccatctcctacgaccactcggaagaggggctgatggcgagcatcgagcgggagtactgccgctga

SEQ ID NO: 111 - skipped

SEQ ID NO: 112 - DNA, 2931 bp, Homo sapiens
  source 1..2931: mol_type = unassigned DNA
atggagctccaggcagcccgcgcctgcttcgccctgctgtggggctgtgcgctggccgcggccgcggcggcgcagggcaaggaagtggtactgctggactttgctgcagctggaggggagctcggctggctcacacacccgtatggcaaagggtgggacctgatgcagaacatcatgaatgacatgccgatctacatgtactccgtgtgcaacgtgatgtctggcgaccaggacaactggctccgcaccaactgggtgtaccgaggagaggctgagcgtatcttcattgagctcaagtttactgtacgtgactgcaacagcttccctggtggcgccagctcctgcaaggagactttcaacctctactatgccgagtcggacctggactacggcaccaacttccagaagcgcctgttcaccaagattgacaccattgcgcccgatgagatcaccgtcagcagcgacttcgaggcacgccacgtgaagctgaacgtggaggagcgctccgtggggccgctcacccgcaaaggcttctacctggccttccaggatatcggtgcctgtgtggcgctgctctccgtccgtgtctactacaagaagtgccccgagctgctgcagggcctggcccacttccctgagaccatcgccggctctgatgcaccttccctggccactgtggccggcacctgtgtggaccatgccgtggtgccaccggggggtgaagagccccgtatgcactgtgcagtggatggcgagtggctggtgcccattgggcagtgcctgtgccaggcaggctacgagaaggtggaggatgcctgccaggcctgctcgcctggattttttaagtttgaggcatctgagagcccctgcttggagtgccctgagcacacgctgccatcccctgagggtgccacctcctgcgagtgtgaggaaggcttcttccgggcacctcaggacccagcgtcgatgccttgcacacgacccccctccgccccacactacctcacagccgtgggcatgggtgccaaggtggagctgcgctggacgccccctcaggacagcgggggccgcgaggacattgtctacagcgtcacctgcgaacagtgctggcccgagtctggggaatgcgggccgtgtgaggccagtgtgcgctactcggagcctcctcacggactgacccgcaccagtgtgacagtgagcgacctggagccccacatgaactacaccttcaccgtggaggcccgcaatggcgtctcaggcctggtaaccagccgcagcttccgtactgccagtgtcagcatcaaccagacagagccccccaaggtgaggctggagggccgcagcaccacctcgcttagcgtctcctggagcatccccccgccgcagcagagccgagtgtggaagtacgaggtcacttaccgcaagaagggagactccaacagctacaatgtgcgccgcaccgagggtttctccgtgaccctggacgacctggccccagacaccacctacctggtccaggtgcaggcactgacgcaggagggccagggggccggcagcaaggtgcacgaattccagacgctgtccccggagggatctggcaacttggcggtgattggcggcgtggctgtcggtgtggtcctgcttctggtgctggcaggagttggcttctttatccaccgcaggaggaagaaccagcgtgcccgccagtccccggaggacgtttacttctccaagtcagaacaactgaagcccctgaagacatacgtggacccccacacatatgaggaccccaaccaggctgtgttgaagttcactaccgagatccatccatcctgtgtcactcggcagaaggtgatcggagcaggagagtttggggaggtgtacaagggcatgctgaagacatcctcggggaagaaggaggtgccggtggccatcaagacgctgaaagccggctacacagagaagcagcgagtggacttcctcggcgaggccggcatcatgggccagttcagccaccacaacatcatccgcctagagggcgtcatctccaaatacaagcccatgatgatcatcactgagtacatggagaatggggccctggacaagttccttcgggagaaggatggcgagttcagcgtgctgcagctggtgggcatgctgcggggcatcgcagctggcatgaagtacctggccaacatgaactatgtgcaccgtgacctggctgcccgcaacatcctcgtcaacagcaacctggtctgcaaggtgtctgactttggcctgtcccgcgtgctggaggacgaccccgaggccacctacaccaccagtggcggcaagatccccatccgctggaccgccccggaggccatttcctaccggaagttcacctctgccagcgacgtgtggagctttggcattgtcatgtgggaggtgatgacctatggcgagcggccctactgggagttgtccaaccacgaggtgatgaaagccatcaatgatggcttccggctccccacacccatggactgcccctccgccatctaccagctcatgatgcagtgctggcagcaggagcgtgcccgccgccccaagttcgctgacatcgtcagcatcctggacaagctcattcgtgcccctgactccctcaagaccctggctgactttgacccccgcgtgtctatccggctccccagcacgagcggctcggagggggtgcccttccgcacggtgtccgagtggctggagtccatcaagatgcagcagtatacggagcacttcatggcggccggctacactgccatcgagaaggtggtgcagatgaccaacgacgacatcaagaggattggggtgcggctgcccggccaccagaagcgcatcgcctacagcctgctgggactcaaggaccaggtgaacactgtggggatccccatctga

SEQ ID NO: 113 - DNA, 4320 bp, Homo sapiens
  source 1..4320: mol_type = unassigned DNA
atggccacgctggcttgccgggtgcagttcttggacgacacggaccctttcaacagcaccaacttccccgagcccagccggccgccgctgttcacgttccgcgaggacctcgcgctcggcacccagctggcgggggtccataggctgctgcaggcgccgcacaagctggatgactgtactctgcagctctctcacaatggcgcctacctggatttggaggccaccctggcagagcagcgggatgagttggaaggcttccaggatgacgccgggcggggcaagaagcacagcatcatcctaaggacgcagctgtctgtgagggtccatgcctgcatcgaaaaactatacaactccagcggacgagatttgagaagggccctcttctccctgaagcagatatttcaggatgacaaggatttggtgcatgaatttgtagtggctgaaggtctgacatgtttgatcaaggtgggagctgaggctgatcagaactatcagaactacatcttaagggctttgggccagattatgttgtatgtggatggaatgaatggagtaataaaccgcaatgaaaccattcagtggctgtacactctcattgggtcaaagttccgcctggtggtgaagacagccctgaagctgctgctcgtctttgtagagtactcggagtccaacgcacctctcctaattcaggctgtcactgctgttgacacgaaaagaggggtcaaaccttggtcaaatatcatggaaatcctggaggaaaaagatggagttgatacggagctactggtttatgcaatgactttggtgaacaagacgttatcaggactaccagaccaagacaccttctacgacgtcgtggactgcctggaggagctgggcattgctgctgtgtcccagaggcacttgaacaagaaagggactgacctggacttagtggagcaactcaacatttatgaggtggcgctcaggcacgaggatggcgatgagaccacggagccaccccccagtgggtgccgggaccggaggagggccagcgtgtgttccagtggcggaggcgagcaccggggcctggaccgcagaaggagccgcaggcactcggtgcagagcatcaagagcaccctgtcggcccccaccagtccctgctcccagtcagctcccagcttcaagcccaaccaagtgcgagatctgcgtgaaaaatacagcaattttggcaataactcttatcactcctcaagaccctcatctggatccagtgtgcccaccacccccacatcatccgtctcacccccacaggaggccaggttggaaaggtcatcaccgagtggtcttctcacatcatccttcaggcagcaccaagagtcactggcagcagagagagagaggcggcggcaggagagagaagaaaggttgcagagaatagagcgggaagaaagaaacaaattcagccgagattatttagacaaaagagaggagcaaaggcaagcaagagaagaaagatacaaatacttggaacagttggcagctgaggagcacgagaaggagctgagaagccggagtgtgagccggggcagagccgacctctccttggacctgacctcgccagcagccccagcctgcctggctcctctgagccatagcccctcatcttcagactctcaagaggctctcacggtgtctgcctcctccccaggaacccctcaccatccccaagcaagtgccggggatcctgaacccgaatcagaggcagaaccggaagcagaggcaggggcggggcaggttgctgatgaagctggccaggacatagcctctgcccacgagggtgcagagactgaagtggagcaggcactagagcaagagccggaagaaagagcctccctcagtgaaaaagagaggcagaacgagggggtgaacgagagggacaactgctctgcctccagcgtctcgtcctccagcagcacgttggagagggaggagaaggaggacaagctctccagggacaggacaactggtttgtggcccgcaggtgtccaggatgcaggtgtaaatggacagtgtggcgacatcctcaccaacaaacggttcatgcttgacatgctgtatgcccataacaggaagtctccggatgatgaggagaagggggatggggaggctgggaggacccagcaggaggcagaggcggtagccagccttgctaccaggatatccaccctgcaggccaactctcagacccaggatgagagtgtcaggagggtggatgtcggctgtttggacaatcggggcagtgtgaaagcatttgctgagaaattcaacagtggggacctggggagaggttccatctcccctgatgctgagcccaatgacaaggtcccagaaacagcgccggtgcagccgaagacagagtctgattacatctgggaccagctcatggccaatccaagagagctcagaatccaagacatggatttcactgacctgggggaggaggatgacattgatgtcctagatgtggacctgggtcacagggaggcccctgggccacctcccccacccccacccacctttctgggtttgccgcccccaccccctccgcccctgttggacagcattcctccccctcctgtccctggtaatttattggttcctcctcctccagtgttcaacgctcctcagggcttagggtggtcccaggtacccaggggtcagcccacattcactaagaaaaagaagaccatccgtttgttctggaatgaagttcggccttttgactggccatgtaaaaacaaccgacgctgcagagaattcctgtggtcaaaactggaacccattaaggtggacacttccagactggagcacctgtttgagtctaaatccaaggaactgtctgtctcaaagaaaactgctgcagatggaaaaaggcaagagatcattgttctggattccaagaggagtaacgccatcaatattggtctgacggtgctgccccctccaaggacgattaagatcgccattttgaattttgatgagtatgccttaaacaaagaaggaatcgagaaaattctaacgatgattcccaccgatgaggagaagcagaaaatccaggaagctcagctggccaaccctgaaatccccctgggcagtgcagagcagttcctcctcaccctgtcctccatcagcgagctctctgcacgacttcacctctgggcattcaaaatggattatgaaactacagaaaaggaagtagcagaaccactcctggacctgaaggaaggaatagaccagttggagaacaataaaaccttgggctttatcctgtctactctcttagccattgggaactttctaaatggaactaatgccaaagcgtttgagttaagctacctcgagaaggttccagaagtcaaagacacagtgcacaagcagtcgcttctccaccatgtgtgcaccatggtggtagaaaacttcccagacagctccgatctgtactcggagatcggggccatcaccaggtcagccaaggttgactttgatcaacttcaggataatttatgtcagatggagagaagatgcaaagcttcatgggatcacctcaaggcaattgcaaaacatgaaatgaaaccagttttaaaacaacggatgtcagagttcctgaaagactgtgcagagcgaattataattttaaagattgtccatagaaggataatcaacagattccactcctttttactctttatgggccatccaccttatgcaattcgggaagtgaacataaacaaattctgcaggattattagtgaatttgcactagagtatcgcacaaccagggaaagggttttgcagcagaaacagaaacgggccaaccacagagagagaaataagaccagagggaagatgatcaccgattctggcaagttctccggcagttctccggcgcccccaagccagccgcagggtctgagctatgcggaggacgcggctgagcacgagaacatgaaggctgtgctgaaaacctcgtccccctccgtggaggacgccacccccgcgctgggcgtccgcacacgcagccgagcaagccgaggatccactagttcctggactatgggaactgatgactcgcccaatgtcacagatgatgcagctgatgagatcatggaccgcatcgtcaagtcagccacccaagtgcccagtcagcgagtggtgccgagggagaggaaacgatcccgggccaaccggaaatctttgcgaagaaccctgaagagcggcctgaccccagaagaagccagagccctgggcttggttggcacctcggagttgcagctgtga

SEQ ID NO: 114 - DNA, 3408 bp, Homo sapiens
  source 1..3408: mol_type = unassigned DNA
atgcgttccagaggcagtgataccgagggctcagcccaaaagaaatttccaagacatactaaaggccacagtttccaagggcctaaaaacatgaagcatagacagcaagacaaagactcccccagtgagtcggatgtaatacttccgtgtcccaaggcagagaagccacacagtggtaatggccaccaagcagaagacctctcaagagatgacctgttatttctcctcagcattctggagggagaactgcaggctcgagatgaggtcataggcattttaaaggctgaaaaaatggacctggctttgctggaagctcagtatgggtttgtcactccaaaaaaggtgttagaggctctccagagagatgcttttcaagcgaaatctaccccttggcaggaggacatctatgagaaaccaatgaatgagttggacaaagttgtggaaaaacataaagaatcttacagacgaatcctgggacagcttttagtggcagaaaaatcccgtaggcaaaccatattggagttggaggaagaaaagagaaaacataaagaatacatggagaagagtgatgaattcatatgcctactagaacaggaatgtgaaagattaaagaagctaattgatcaagaaatcaagtctcaggaggagaaggagcaagaaaaggagaaaagggtcaccaccctgaaagaggagctgaccaagctgaagtcttttgctttgatggtggtggatgaacagcaaaggctgacggcacagctcacccttcaaagacagaaaatccaagagctgaccacaaatgcaaaggaaacacataccaaactagcccttgctgaagccagagttcaggaggaagagcagaaggcaaccagactagagaaggaactgcaaacgcagaccacaaagtttcaccaagaccaagacacaattatggcgaagctcaccaatgaggacagtcaaaatcgccagcttcaacaaaagctggcagcactcagccggcagattgatgagttagaagagacaaacaggtctttacgaaaagcagaagaggagctgcaagatataaaagaaaaaatcagtaagggagaatatggaaacgctggtatcatggctgaagtggaagagctcaggaaacgtgtgctagatatggaagggaaagatgaagagctcataaaaatggaggagcagtgcagagatctcaataagaggcttgaaagggagacgttacagagtaaagactttaaactagaggttgaaaaactcagtaaaagaattatggctctggaaaagttagaagacgctttcaacaaaagcaaacaagaatgctactctctgaaatgcaatttagaaaaagaaaggatgaccacaaagcagttgtctcaagaactggagagtttaaaagtaaggatcaaagagctagaagccattgaaagtcggctagaaaagacagaattcactctaaaagaggatttaactaaactgaaaacattaactgtgatgtttgtagatgaacggaaaacaatgagtgaaaaattaaagaaaactgaagataaattacaagctgcttcttctcagcttcaagtggagcaaaataaagtaacaacagttactgagaagttaattgaggaaactaaaagggcgctcaagtccaaaaccgatgtagaagaaaagatgtacagcgtaaccaaggagagagatgatttaaaaaacaaattgaaagcggaagaagagaaaggaaatgatctcctgtcaagagttaatatgttgaaaaataggcttcaatcattggaagcaattgagaaagatttcctaaaaaacaaattaaatcaagactctgggaaatccacaacagcattacaccaagaaaacaataagattaaggagctctctcaagaagtggaaagactgaaactgaagctaaaggacatgaaagccattgaggatgacctcatgaaaacagaagatgaatatgagactctagaacgaaggtatgctaatgaacgagacaaagctcaatttttatctaaagagctagaacatgttaaaatggaacttgctaagtacaagttagcagaaaagacagagaccagccatgaacaatggcttttcaaaaggcttcaagaagaagaagctaagtcagggcacctctcaagagaagtggatgcattaaaagagaaaattcatgaatacatggcaactgaagacctaatatgtcacctccagggagatcactcagtcctgcaaaaaaaactaaatcaacaagaaaacaggaacagagatttaggaagagagattgaaaacctcactaaggagttagagaggtaccggcatttcagtaagagcctcaggcctagtctcaatggaagaagaatttccgatcctcaagtattttctaaagaagttcagacagaagcagtagacaatgaaccacctgattacaagagcctcattcctctggaacgtgcagtcatcaatggtcagttatatgaggagagtgagaatcaagacgaggaccctaatgatgagggatctgtgctgtccttcaaatgcagccagtctactccatgtcctgttaacagaaagctatggattccctggatgaaatccaaggagggccatcttcagaatggaaaaatgcaaactaaacccaatgccaactttgtgcaacctggagatctagtcctaagccacacacctgggcagccacttcatataaaggttactccagaccatgtacaaaacacagccactcttgaaatcacaagtccaaccacagagagtcctcactcttacacgagtactgcagtgataccgaactgtggcacgccaaagcaaaggataaccatcctccaaaacgcctccataacaccagtaaagtccaaaacctctaccgaagacctcatgaatttagaacaaggcatgtccccaattaccatggcaacctttgccagagcacagaccccagagtcttgtggttctctaactccagaaaggacaatgtcccctattcaggttttggctgtgactggttcagctagctctcctgagcagggacgctccccagaaccaacagaaatcagtgccaagcatgcgatattcagagtctccccagaccggcagtcatcatggcagtttcagcgttcaaacagcaatagctcaagtgtgataactactgaggataataaaatccacattcacttaggaagtccttacatgcaagctgtagccagccctgtgagacctgccagcccttcagcaccactgcaggataaccgaactcaaggcttaattaacggggcactaaacaaaacaaccaataaagtcaccagcagtattactatcacaccaacagccacacctcttcctcgacaatcacaaattacagtggaaccacttcttctgcctcattga

SEQ ID NO: 115 - skipped

SEQ ID NO: 116 - DNA, 1548 bp, Homo sapiens
  source 1..1548: mol_type = unassigned DNA
atgggatcgttgagcagccgggtgctgcgccagccaagaccagcccttgcccagcaggcgcagggtgccagggcggggggctcggcccggaggccggacactggagacgatgcggcgggccacggattctgttactgtgcgggcagccacaagcgcaagcggagcagcgggtccttctgctactgtcaccctgactcggagacggacgaggatgaggaggagggggacgagcagcagcggctcctcaacacccctcgaaggaaaaaattaaagagtacatctaaatatatttatcaaacattatttttgaatggtgaaaacagtgacattaagatttgtgctctaggagaagaatggagcttacacaaaatatatttatgtcaatctggctacttttctagtatgttcagtggttcttggaaagaatccagcatgaatattattgaactggagattcctgaccagaacattgatgtagaagcactgcaggttgcatttggttcactgtatcgagatgatgtcttgataaagcccagtcgagttgttgccattttggcagcagcttgtttgctgcagttggacggtttaatacagcagtgtggtgagacaatgaaggaaacagttaatgtgaaaactgtatgtggctattacacatcagcagggacctatggattagattctgtaaagaaaaagtgccttgaatggcttctaaacaatttgatgactcaccagaatgttgaactttttaaagaactcagtataaatgtcatgaaacagctcattggttcatctaacttatttgtgatgcaagtggagatggatatatacactgctctaaaaaagtggatgttccttcaacttgtgccttcttggaatggatctttaaaacagcttttgacagaaacagatgtctggttttctaaacagaggaaagattttgaaggtatggcctttcttgaaactgaacaaggaaaaccatttgtgtcagtattcagacatttaaggttacaatatattatcagtgatctggcttctgcaagaattattgaacaagatgctgtagtaccttcagaatggctctcttctgtgtataaacagcagtggtttgctatgctgcgggcagaacaggacagtgaggtggggcctcaagaaatcaataaagaagaactagagggaaacagcatgaggtgtggtagaaagcttgccaaagatggtgaatactgctggcgttggacaggttttaacttcggcttcgacctacttgtaacttacaccaatcgatacatcattttcaaacgcaatacactgaatcagccatgtagcggatctgtcagtttacagcctcgaaggagcatagcatttagattacgtttggcttcttttgatagtagtggaaaactaatatgtagtagaacaactggctatcaaatacttacacttgaaaaggatcaggaacaagtggtgatgaacttggacagcaggcttctgatcttccctttatatatctgctgtaacttcttgtatatatcaccagaaaaaaagaattga

SEQ ID NO: 117 - DNA, 1125 bp, Homo sapiens
  source 1..1125: mol_type = unassigned DNA
atggcggcgtccgcagctgccgctgagctccaggcttctgggggtccgcggcacccagtgtgtctgttggtgttgggaatggcgggatccgggaaaaccacttttgtacagaggctcacaggacacctgcatgcccaaggcactccaccgtatgtgatcaacctggatccagcagtacatgaagttccctttcctgccaatattgatattcgtgatactgtaaagtataaagaagtaatgaaacaatatggacttggacccaatggcggcatagtgacctcactcaatctctttgctaccagatttgatcaggtgatgaaatttattgagaaggcccagaacatgtccaaatatgtgttgattgacacacctggacagattgaggtattcacctggtcagcttctgggacaattatcactgaagcccttgcatcctcatttccaacagttgtcatctatgtaatggacacatcgagaagtaccaacccagtgaccttcatgtccaacatgctctatgcctgcagcatcttatacaaaaccaagctgcctttcattgtggtcatgaataaaactgacatcattgaccacagctttgcagtggaatggatgcaggattttgaggctttccaagatgccttgaatcaagagactacatacgtcagtaacctgactcgttcaatgagcctggtgttagatgagttttacagctcactcagggtggtgggtgtctctgctgttctgggtactggattagatgaactctttgtgcaagttaccagtgctgccgaagaatatgaaagggagtatcgtcctgaatatgaacgtctgaaaaaatcactggccaacgcagagagccaacagcagagagaacaactggaacgccttcgaaaagatatgggttctgtagccttggatgcagggactgccaaagacagcttatctcctgtgctgcacccttctgatttgatcctgactcgaggaaccttggatgaagaggatgaggaagcagacagcgatactgatgacattgaccacagagttacagaggaaagccatgaagagccagcattccagaattttatgcaagaatcgatggcacaatactggaagagaaacaataaatag

SEQ ID NO: 118 - DNA, 2622 bp, Homo sapiens
  source 1..2622: mol_type = unassigned DNA
atgacgacccgaaaactgagcgcccactcggcagcgactcccggctacaaggctgtgacacacaagcaccacaccggctgggcaaggatggcaaagactgggctgcccgagaagggacagagtcaggctggaggggaatctggatctgggcagctcctggaccaagagaatggagcaggggaatcagcgctggtctccgtctatgtacatctggactttccagataagacctggccccctgaactctccaggacactgactctccctgctgcctcagcttcctcttccccaaggcctcttctcactggcctcagactcacaacaggtgagtacatgagctgcttcgaggcccagggcttcaagtggaacctgtatgaggtggtgagggtgcccttgaaggcgacagatgtggctcgacttccataccagctgtccatctcctgtgccacctcccctggcttccagctgagctgctgcatccccagcacaaacctggcctacaccgcggcctggagccctggagagggcagcaaagcttcctccttcaacgagtcaggctctcagtgctttgtgctggctgttcagcgctgcccgatggctgacaccacgtacgcttgtgacctgcagagcctgggcctggctccactcagggtccccatctccatcaccatcatccaggatggagacatcacctgccctgaggacgcctcggtgctcacctggaatgtcaccaaggctggccacgtggcacaggccccatgtcctgagagcaagaggggcatagtgaggaggctctgtggggctgacggagtctgggggccggtccacagcagctgcacagatgcgaggctcctggccttgttcactagaaccaagctgctgcaggcaggccagggcagtcctgctgaggaggtgccacagatcctggcacagctgccagggcaggcggcagaggcaagttcaccctccgacttactgaccctgctgagcaccatgaaatacgtggccaaggtggtggcagaggccagaatacagcttgaccgcagagccctgaagaatctcctgattgccacagacaaggtcctagatatggacaccaggtctctgtggaccctggcccaagcccggaagccctgggcaggctcgactctcctgctggctgtggagaccctggcatgcagcctgtgcccacaggaccaccccttcgccttcagcttacccaatgtgctgctgcagagccagctgtttggacccacgtttcctgctgactacagcatctccttccctactcggcccccactgcaggctcagattcccaggcactcactggccccattggtccgtaatggaactgaaataagtattactagcctggtgctgcgaaaactggaccaccttctgccctcaaactatggacaagggctgggggattccctctatgccactcctggcctggtccttgtcatttccatcatggcaggtgaccgggccttcagccagggagaggtcatcatggactttgggaacacagatggttcccctcactgtgtcttctgggatcacagtctcttccagggcagggggggttggtccaaagaagggtgccaggcacaggtggccagtgccagccccactgctcagtgcctctgccagcacctcactgccttctccgtcctcatgtccccacacactgttccggaagaacccgctctggcgctgctgactcaagtgggcttgggagcttccatactggcgctgcttgtgtgcctgggtgtgtactggctggtgtggagagtcgtggtgcggaacaagatctcctatttccgccacgccgccctgctcaacatggtgttctgcttgctggccgcagacacttgcttcctgggcgccccattcctctctccagggccccgaagcccgctctgccttgctgccgccttcctctgtcatttcctctacctggccacctttttctggatgctggcgcaggccctggtgttggcccaccagctgctctttgtctttcaccagctggcaaagcaccgagttctccccctcatggtgctcctgggctacctgtgcccactggggttggcaggtgtcaccctggggctctacctacctcaagggcaatacctgagggagggggaatgctggttggatgggaagggaggggcgttatacaccttcgtggggccagtgctggccatcataggcgtgaatgggctggtactagccatggccatgctgaagttgctgagaccttcgctgtcagagggacccccagcagagaagcgccaagctctgctgggggtgatcaaagccctgctcattcttacacccatctttggcctcacctgggggctgggcctggccactctgttagaggaagtctccacggtccctcattacatcttcaccattctcaacaccctccagggcgtcttcatcctattgtttggttgcctcatggacaggaagatacaagaagctttgcgcaaacgcttctgccgcgcccaagcccccagctccaccatctccctggccacaaatgaaggctgcatcttggaacacagcaaaggaggaagcgacactgccaggaagacagatgcttcagagtga

SEQ ID NO: 119 - skipped

SEQ ID NO: 120 - DNA, 2292 bp, Homo sapiens
  source 1..2292: mol_type = unassigned DNA
atggtggcctgccgggcgattggcatcctcagccgcttttctgccttcaggatcctccgctcccgaggttatatatgccgcaattttacagggtcttctgctttgctgaccagaacccatattaactatggagtcaaaggggatgtggcagttgttcgaattaactctcccaattcaaaggtaaatacactgagtaaagagctacattcagagttctcagaagttatgaatgaaatctgggctagtgatcaaatcagaagtgccgtccttatctcatcaaagccaggctgctttattgcaggtgctgatatcaacatgttagccgcttgcaagacccttcaagaagtaacacagctatcacaagaagcacagagaatagttgagaaacttgaaaagtccacaaagcctattgtggctgccatcaatggatcctgcctgggaggaggacttgaggttgccatttcatgccaatacagaatagcaacaaaagacagaaaaacagtattaggtacccctgaagttttgctgggggccttaccaggagcaggaggcacacaaaggctgcccaaaatggtgggtgtgcctgctgctttggacatgatgctgactggtagaagcattcgtgcagacagggcaaagaaaatgggactggttgaccaactggtggaacccctgggaccaggactaaaacctccagaggaacggacaatagaatacctagaagaagttgcaattacttttgccaaaggactagctgataagaagatctctccaaagagagacaagggattggtggaaaaattgacagcgtatgccatgactattccatttgtcaggcaacaggtttacaaaaaagtggaagaaaaagtgcgaaagcagactaaaggcctttatcctgcacctctgaaaataattgatgtggtaaagactggaattgagcaagggagtgatgccggttatctctgtgaatctcagaaatttggagagcttgtaatgaccaaagaatcaaaggccttgatgggactctaccatggtcaggtcctgtgcaagaagaataaatttggagctccacagaaggatgttaagcatctggctattcttggtgcagggctgatgggagcaggcatcgcccaagtctccgtggataaggggctaaagactatacttaaagatgccaccctcactgcgctagaccgaggacagcaacaagtgttcaaaggattgaatgacaaagtgaagaagaaagctctaacatcatttgaaagggattccatcttcagcaacttgactgggcagcttgattaccaaggttttgaaaaggccgacatggtgattgaagctgtgtttgaggaccttagtcttaagcacagagtgctaaaggaagtagaagcggtgattccagatcactgtatctttgccagtaacacatctgctctcccaatcagtgaaatcgctgctgtcagcaaaagacctgagaaggtgattggcatgcactacttctctcccgtggacaagatgcagctgctggagattatcacgaccgagaaaacttccaaagacaccagtgcttcagctgtagcagttggtctcaagcaggggaaggtcatcattgtggttaaggatggacctggcttctatactaccaggtgtcttgcgcccatgatgtctgaagtcatccgaatcctccaggaaggagttgacccgaagaagctggattccctgaccacaagctttggctttcctgtgggtgccgccacactggtggatgaagttggtgtggatgtagcgaaacatgtggcggaagatctgggcaaagtctttggggagcggtttggaggtggaaacccagaactgctgacacagatggtgtccaagggcttcctaggtcgtaaatctgggaagggcttttacatctatcaggagggtgtgaagaggaaggatttgaattctgacatggatagtattttagcgagtctgaagctgcctcctaagtctgaagtctcatcagacgaagacatccagttccgcctggtgacaagatttgtgaatgaggcagtcatgtgcctgcaagaggggatcttggccacacctgcagagggagacatcggagccgtctttgggcttggcttcccgccttgtctgggagggcctttccgctttgtggatctgtatggcgcccagaagatagtggaccggctcaagaaatatgaagctgcctatggaaaacagttcaccccatgccagctgctagctgaccatgctaacagccctaacaagaagttctaccagtga

SEQ ID NO: 121 - DNA, 1179 bp, Homo sapiens
  source 1..1179: mol_type = unassigned DNA
atgcagtccccggcggtgctcgtcacctccaggcgacttcagaatgcccacactggcctcgacctgactgtgccccagcaccaggaggtacggggcaagatgatgtctggacacgtggagtaccagatcctggtggtgacccgtctggctgcgttcaagtcggccaagcacaggcccgaggatgtcgtccagttcttggtctccaaaaagtacagcgagattgaggagttttaccagaaactgagcagtcgttatgcagcagccagcctccccccactacccaggaaggtcctgtttgttggggagtctgacatccgggagaggagagccgtgttcaatgagatcctgcgctgtgtctccaaggatgccgagttggcaggcagcccagagctgctagagttcttaggtaccagatccccaggggctgcagggctcaccagcagagattcctctgtcctggatggcacagacagtcagacagggaatgatgaagaggctttcgacttttttgaggagcaagaccaagtggcagaagagggtccgcccgtccagagcctgaagggcgaggatgctgaggaatccttggaggaggaggaggcgctggaccctctgggcattatgcgctccaagaagcccaagaaacatcccaaagtggccgtgaaagccaagccctcgccccggctcaccatctttgacgaggaggtggaccctgatgaggggctctttggcccgggcaggaagctgtctccacaggacccctcggaggacgtgtcatccgtggaccccctgaagctatttgatgatcctgacctcggcggggccatccccctgggtgactccctcctgctgccagccgcctgtgagagtggagggcccacacccagcctcagccacagggacgcctccaaggaactgttcagagttgaagaggacttggaccagattctgaacctgggagctgagcccaaacccaagccccagcttaagcccaagccaccagtggcagctaagccggtgatacccagaaaaccagctgttccccccaaagcgggcccggctgaagctgtggctgggcagcagaagccgcaggagcagatccaagccatggacgagatggacatcttgcagtacatccaggaccacgatacaccagcccaggccgcccccagcctcttctga

SEQ ID NO: 122 - DNA, 1977 bp, Homo sapiens
  source 1..1977: mol_type = unassigned DNA
atgaaactgtattgcctgtcagggcacccaaccttaccatgcaatgtgctcaaattcaaatcaaccaccattatgttggactgcggactggacatgacttctaccctcaatttccttcctttgccacttgttcaaagtcccaggctgtccaatcttcctggctggtccctgaaggatggaaatgctttcttggacaaggagctaaaggagtgctcgggtcatgtatttgtggattctgtgccggaattctgtttaccagagacggagctaatagatctgtctacagtagatgtgattctcatctctaactatcactgtatgatggcgctgccatacatcaccgagcacaccggcttcacaggcacagtgtatgccacggaacccaccgtccagatcggcaggcttctcatggaagagctggtgaatttcattgaaagagtgccaaaggctcagtctgcctccttgtggaagaataaggacattcagaggctgttaccttctcctctcaaggatgcagtggaagtctcaacctggagaagatgctatacaatgcaagaggtgaactctgcccttagtaaaatccagctggtgggatattctcagaaaattgagctttttggtgcggtccaggtgactcctctgagctctggctatgcccttgggagctccaactggatcatccagtctcattacgagaaagtgtcttatgtctctggatcctccttgcttaccacacacccccagcccatggaccaagcttctctcaaaaacagcgatgttcttgttctgacagggcttacccagatccccactgcaaacccagatggaatggtgggagagttctgcagcaacctagctctgacagtccggaatggaggaaacgtgttggttccctgctacccttctggagtgatctatgacctcctggagtgcctatatcagtacatcgactcagccgggctttccagcgtccccctctacttcatctcccctgtggccaacagttcactggagttttcccagatctttgctgagtggctttgtcacaacaaacagagtaaggtgtatcttccagaaccaccttttcctcatgcagagctcattcagaccaataagctgaagcactaccccagcatccacggagacttcagcaacgactttagacagccctgtgtggtgttcaccgggcacccttccctccgcttcggggacgtggtccacttcatggagctctggggaaaatctagtctcaataccgtcatattcacggaaccagacttctcctacctggaagccctggctccttaccagccgctggccatgaaatgcatctactgccccatcgacacccggctgaacttcatccaggtgtcaaagctgcttaaagaagtgcagcccctgcacgtggtgtgtcctgagcagtacactcagccgcccccagcccagtcccacaggatggacctcatgatcgactgccagccccccgccatgtcctatcggcgggctgaggttctcgccctgcccttcaaacgtcggtacgagaagatcgagatcatgccagagctcgcagattcactggtgcccatggagatcaagcctggcatctccttggcaactgtctcggccgtgctgcacaccaaagataacaagcacttgcttcagccccctcctcggcccgcccagcccacgagcgggaagaagagaaagcgggtgagcgatgacgtaccagactgcaaagtcctgaagcctttgttgagcggttccatccctgtggagcagttcgtgcagaccctggagaagcatggcttcagtgatattaaggtggaggacacagccaagggccatatcgtcctgctccaggaggctgagacgctcatccagattgaagaagactcgacccatatcatctgcgacaatgacgagatgctcagagtgcgactgcgggaccttgtcctcaaattcttacagaagttctga

SEQ ID NO: 123 - DNA, 3222 bp, Homo sapiens
  source 1..3222: mol_type = unassigned DNA
atggccgccgccgggcagctgtgcttgctctacctgtcggcggggctcctgtcccggctcggcgcagccttcaacttggacactcgggaggacaacgtgatccggaaatatggagaccccgggagcctcttcggcttctcgctggccatgcactggcaactgcagcccgaggacaagcggctgttgctcgtgggggccccgcgggcagaagcgcttccactgcagagagccaacagaacgggagggctgtacagctgcgacatcaccgcccgggggccatgcacgcggatcgagtttgataacgatgctgaccccacgtcagaaagcaaggaagatcagtggatgggggtcaccgtccagagccaaggtccagggggcaaggtcgtgacatgtgctcaccgatatgaaaaaaggcagcatgttaatacgaagcaggaatcccgagacatctttgggcggtgttatgtcctgagtcagaatctcaggattgaagacgatatggatgggggagattggagcttttgtgatgggcgattgagaggccatgagaaatttggctcttgccagcaaggtgtagcagctacttttactaaagactttcattacattgtatttggagccccgggtacttataactggaaagggattgttcgtgtagagcaaaagaataacactttttttgacatgaacatctttgaagatgggccttatgaagttggtggagagactgagcatgatgaaagtctcgttcctgttcctgctaacagttacttaggtttttctttggactcagggaaaggtattgtttctaaagatgagatcacttttgtatctggtgctcccagagccaatcacagtggagccgtggttttgctgaagagagacatgaagtctgcacatctcctccctgagcacatattcgatggagaaggtctggcctcttcatttggctatgatgtggcggtggtggacctcaacaaggatgggtggcaagatatagttattggagccccacagtattttgatagagatggagaagttggaggtgcagtgtatgtctacatgaaccagcaaggcagatggaataatgtgaagccaattcgtcttaatggaaccaaagattctatgtttggcattgcagtaaaaaatattggagatattaatcaagatggctacccagatattgcagttggagctccgtatgatgacttgggaaaggtttttatctatcatggatctgcaaatggaataaataccaaaccaacacaggttctcaagggtatatcaccttattttggatattcaattgctggaaacatggaccttgatcgaaattcctaccctgatgttgctgttggttccctctcagattcagtaactattttcagatcccggcctgtgattaatattcagaaaaccatcacagtaactcctaacagaattgacctccgccagaaaacagcgtgtggggcgcctagtgggatatgcctccaggttaaatcctgttttgaatatactgctaaccccgctggttataatccttcaatatcaattgtgggcacacttgaagctgaaaaagaaagaagaaaatctgggctatcctcaagagttcagtttcgaaaccaaggttctgagcccaaatatactcaagaactaactctgaagaggcagaaacagaaagtgtgcatggaggaaaccctgtggctacaggataatatcagagataaactgcgtcccattcccataactgcctcagtggagatccaagagccaagctctcgtaggcgagtgaattcacttccagaagttcttccaattctgaattcagatgaacccaagacagctcatattgatgttcacttcttaaaagagggatgtggagacgacaatgtatgtaacagcaaccttaaactagaatataaattttgcacccgagaaggaaatcaagacaaattttcttatttaccaattcaaaaaggtgtaccagaactagttctaaaagatcagaaggatattgctttagaaataacagtgacaaacagcccttccaacccaaggaatcccacaaaagatggcgatgacgcccatgaggctaaactgattgcaacgtttccagacactttaacctattctgcatatagagaactgagggctttccctgagaaacagttgagttgtgttgccaaccagaatggctcgcaagctgactgtgagctcggaaatccttttaaaagaaattcaaatgtcactttttatttggttttaagtacaactgaagtcacctttgacaccccagatctggatattaatctgaagttagaaacaacaagcaatcaagataatttggctccaattacagctaaagcaaaagtggttattgaactgcttttatcggtctcgggagttgctaaaccttcccaggtgtattttggaggtacagttgttggcgagcaagctatgaaatctgaagatgaagtgggaagtttaatagagtatgaattcagggtaataaacttaggtaaacctcttacaaacctcggcacagcaaccttgaacattcagtggccaaaagaaattagcaatgggaaatggttgctttatttggtgaaagtagaatccaaaggattggaaaaggtaacttgtgagccacaaaaggagataaactccctgaacctaacggagtctcacaactcaagaaagaaacgggaaattactgaaaaacagatagatgataacagaaaattttctttatttgctgaaagaaaataccagactcttaactgtagcgtgaacgtgaactgtgtgaacatcagatgcccgctgcgggggctggacagcaaggcgtctcttattttgcgctcgaggttatggaacagcacatttctagaggaatattccaaactgaactacttggacattctcatgcgagccttcattgatgtgactgctgctgccgaaaatatcaggctgccaaatgcaggcactcaggttcgagtgactgtgtttccctcaaagactgtagctcagtattcgggagtaccttggtggatcatcctagtggctattctcgctgggatcttgatgcttgctttattagtgtttatactatggaagtgtggtttcttcaagagaaataagaaagatcattatgatgccacatatcacaaggctgagatccatgctcagccatctgataaagagaggcttacttctgatgcatag

SEQ ID NO: 124 - DNA, 1281 bp, Homo sapiens
  source 1..1281: mol_type = unassigned DNA
atggaaggccacaaggcagaagaagaggtgctagatgttctccgactgaacgtgggtggctgtatttacacagcccggcgggagtccttgtgccgcttcaaggactccatgttggcatctatgttcagtggtcgctttcctctaaaaacagatgagtcaggggcttgtgttattgaccgtgatggacgtctatttaaataccttttggattaccttcatggagaagttcagattcccacagatgagcaaacccgcatcgccctacaggaagaggctgattactttggcatcccttatccatacagcctgtctgaccatttggccaatgaaatggagacatattctttaaggtcaaatatagaacttaaaaaggctttaacagacttctgtgattcatatggcttagtctgcaataaaccaacagtttgggttctccactatcttaacacatctggtgcaagctgtgagagtagaattattggtgtatatgccacaaaaactgatggaacagacgctattgaaaagcagctgggaggaagaattcacagcaaaggcatttttaaaagagaggcgggaaataatgttcagtacatttggagctattattcagtagcagagttgaagaaaatgatggatgcctttgatgcttgggaaggaaaaggtgttagctactggcgggtgcctcatgagctgatagagtgttggactctagaagaacggcctttacttggaagcctgcgtcacatggctccaattcgaaagaggcgactgataacgttcaatgaagcggacgaaagtgtgaactataagactggtcctaagccagttagatttttgggcccttccacaagtacccaaattaaagtcaagaactcggcctcagtcacggtgtctccagccagtgccatccagacgtcggctggggcgacagcaaaccggtttcaaagtggtagccgcagaaaggcagctcagcgctctgcaccttccagagccacggccctggtgggcacgggggcacctgggcatcctcaggcttcccctggggctgcgagcgctgaaaatggaggcacgcacttacctccagctaaggtgctactctccgacaagaagcctacaccccagcgggtgataaagctgaagaggactccgctgtgcgccaccgcgccttgcctgccctcccccacggccacgaggcaggccaactccctcaagccgcttcccggcgaagctgcccgtgccttgggagtgcggactgagaacgggaagaacaagggaaattga

SEQ ID NO: 125 - DNA, 2874 bp, Homo sapiens
  source 1..2874: mol_type = unassigned DNA
atggcggatccagccgaatgcagcatcaaagtgatgtgccggttccggcccctcaacgaagcggagatcctccgcggggacaaattcatccccaaatttaaaggcgatgagaccgtggtgatcgggcaagggaagccatatgtcttcgacagagtgctacctcccaacacgacccaagagcaggtttacaatgcatgtgcgaagcaaattgtcaaagatgtccttgaaggttataacgggacgatttttgcgtatgggcagacttcatcaggaaaaacccacaccatggaggggaagctgcatgacccccagctcatggggatcatcccacgaattgcccatgatatctttgaccatatctactccatggatgagaacctggagtttcacataaaggtttcctattttgagatctacttggacaaaataagggacttacttgatgtatccaagaccaacttggctgttcatgaagataaaaacagagtcccgtatgtaaaggggtgcactgagcggtttgtgtcgagccctgaggaagtcatggatgtaatagatgaaggcaaagcaaaccgacacgtggctgtgacaaacatgaatgaacacagctctagaagtcacagtatcttcctgataaatattaaacaagagaatgtagagactgaaaaaaaactcagtgggaaactttatttggttgatttggctgggagcgaaaaggtcagcaaaactggtgccgagggagctgttcttgacgaagctaaaaatatcaataagtctttgtctgctcttggaaatgtgatctctgctttggcagaagggacaaaaacacatgtgccataccgggacagcaagatgactcggattcttcaggactctttgggtgggaactgcagaaccaccatcgtcatttgctgttctccttctgtcttcaatgaggctgagaccaagtccacactgatgttcggacagagagctaagaccatcaagaatacagtctctgtgaacctagaactgacagcagaagaatggaagaagaaatatgaaaaagagaaagagaaaaacaagactttgaagaatgttatccagcatctggagatggagctaaacaggtggaggaatggagaagctgtgcctgaggatgaacagatcagtgccaaggaccagaagaacctggagccttgtgataacacccccatcatagacaatattgctcctgttgttgctggcatctctacagaggagaaagagaagtacgatgaggagatctccagtctctacagacaactggatgacaaggatgatgaaattaaccagcagagccagctggctgaaaagctgaagcaacagatgttggatcaggatgagcttttagcttccacaagaagagactatgagaagatacaggaggagctgacacgtctccagattgaaaatgaggcagccaaggatgaggtgaaagaagttctccaggccctggaggagctggctgtcaattatgaccagaaatcacaggaagtggaggataagacccgggccaatgagcagctgacagacgagctggcccagaaaacgactacattgacaaccacacagagagagctgagccagctacaagagcttagcaaccaccagaagaaaagggcaactgagatcctgaatttgctgttgaaagatctgggggagataggtggaattattggcaccaatgatgtgaaaactttggcagatgtgaatggagtcattgaggaggagtttaccatggcccgcctgtacatcagcaagatgaagtcagaggtcaagtccctggtgaaccgcagcaaacagctcgagagcgcccagatggactccaacaggaagatgaatgccagcgagcgggagctggcagcctgccagctgctcatctcccagcacgaagccaagatcaagtctctgacagactacatgcagaacatggaacagaagaggaggcagctagaagagtcccaggactcgctcagcgaagagctggcaaagctccgagcccaggaaaaaatgcacgaagtcagcttccaggataaggagaaggaacatctgacgcggttgcaggatgctgaagaaatgaagaaggcgctggagcagcagatggagagccaccgggaagctcaccagaagcagctgtccagactccgagacgaaattgaggagaagcagaaaatcattgatgagattcgggatttgaatcagaaactgcaactggaacaggagaagcttagttctgattataacaagctgaaaatagaggaccaagagagagaaatgaagctggaaaagctcttattgctcaacgataaaagggaacaagccagagaagacctcaaagggctggaggagacagtgtctagagaattgcagacactgcacaaccttcggaaactctttgtccaggatctgaccacccgagttaaaaaaagtgtggagttggacaacgatgatggagggggcagtgctgcccagaagcagaaaatttccttcttggagaataacctggagcagctcaccaaagttcacaagcagctggtccgggacaacgcagacctgcgctgtgaactgcccaagctggagaagcggctgcgtgccacggcggagcgcgtcaaggctctggagagcgcgctgaaggaggccaaggagaacgccatgcgggaccgtaagcgctaccagcaggaggtggatcgtatcaaggaggccgtgcgggccaagaacatggccagaagggcccattcagcccagatcgccaagcccatccgccccggacactacccggcctcatctccaacggccgtccatgccattcgagggggaggaggcagctcttcaaattccactcactaccagaaataa

SEQ ID NO: 126 - DNA, 1860 bp, Homo sapiens
  source 1..1860: mol_type = unassigned DNA
atgtcaggcctggtgttggggcagcgggatgagcctgcaggccaccggctcagccaagaggagatcctggggagcacacggctggtcagccaagggctagaggccctacgcagtgaacaccaggccgtgctgcaaagcctgtcccagaccattgagtgtctgcagcagggaggccatgaggaagggctggtgcatgagaaggcccggcagcttcgccgttctatggaaaacattgagctcgggctgagtgaggcccaggtgatgctggctctagccagccacctgagcacagtggagtcggagaaacagaagctgcgggctcaggtgcggcggctatgccaggagaaccagtggctgcgggatgagctggctggcacccagcagcggctacagcgcagtgaacaggctgtggctcagctggaggaggaaaagaagcacctggagttcctggggcagctgcggcagtatgatgaggatggacatacctcggaggagaaagaaggcgatgccaccaaggattccctggatgacctctttcctaatgaggaggaagaggaccccagcaatggcttgtcccgtggtcaaggtgctacagcagctcagcagggtggatatgagatcccagcaaggttgcggacgttgcacaacctggtgatccagtacgcagcccaaggtcgctatgaggtggccgtgccactctgtaagcaggcactagaggacctggagcgcacatcaggccgtggccaccctgatgtcgccaccatgctcaacatccttgctttggtgtatcgtgaccagaataagtataaggaagctgcccacctgctgaatgatgcccttagcatccgggagagcaccttgggacctgaccatcctgctgtggctgccacactcaacaatttggctgtgctctatggcaaaaggggcaagtacaaggaggcagagcctctgtgccagcgggcactggagattcgagaaaaggtcctgggcacgaatcatccagatgtggcaaaacagctgaacaacctggccctcttgtgccaaaaccagggcaagtatgaggccgtggaacgctactaccagcgagcactggccatctacgaggggcagctggggccggacaaccctaatgtagcccggaccaagaacaacctggcttcctgttacctgaaacagggcaaatatgctgaggctgagacactatacaaagagatcctgacccgtgcccatgtacaggagtttgggtctgtggatgatgaccacaagcccatctggatgcatgcagaggagcgggaggaaatgagcaaaagccggcaccatgagggtgggacaccctatgctgagtatggaggctggtacaaggcctgcaaagtgagcagccccacagtgaacactactctgagaaacctgggagctctgtataggcgccagggaaagctggaggctgctgagaccctggaggaatgtgccctgcggtcccggagacagggcactgaccctatcagccagacgaaggtggcagagctgcttggggagagtgatggtagaaggacctcccaggagggccctggagacagtgtgaaattcgagggaggtgaagatgcttctgtggctgtggagtggtccggggatggcagtgggaccctgcagaggagtggctctcttggcaagatccgggatgtgctccgcagaagcagtgaactcttggtgaggaagctccaggggactgagcctcggccctccagcagcaacatgaagcgagcagcctccttgaactatctgaaccaacctagtgcagcacccctccaggtctcccggggcctcagtgccagcaccatggacctctcttcaagcagctga

SEQ ID NO: 127 - DNA, 1924 bp, Homo sapiens
  source 1..1924: mol_type = unassigned DNA
aagcaggcagggaccgagaggggtgatggcgcgcccacccctgcagagccgcctgcgcggttgtcccgcgcgtccctgccggcgaaggctgtgagaagcaccgcggggctacggcgcctccatcctctctaacagccgcgcttaccagacagccagcctccagcgctgctaggctactccgagcaggggagaaaagacgccggtccgccggggaccaggagggagacgtgaaaccagaggcccgggggccccctctccgcctgtgcgacttgtagtctcgtaccagacgcgtccgcttcactgctgaatctgaaaacgtgggctcttgagagctgcccttggaaggagctgtgctttctgcctcatctttaacttttcgtttattcagcaaatatgtatcaagttccgacttcgtggaagagattgtgttagacactgggagtaatagaaacataattaagaagcaggggtcccggacctgaagggcctgagcgtcggttctgaaggctgagaagttcaagagcaagtgctggcatctgatgagggccttcttgctgtatcatcctacggtggaagggtttcactgtatctcccaggctggaatatagtggagatcatggctcactgcaaccttgacctcctgggctcaagcggtcttcacacctcagcctccccagtagctgatcctacaggttctttcaaactgggaaagctcattaaaagaaaaatgagaaaatctattggctggatcctgaacccttggaagctctgtctggatacattcttctctggcaggatgctctatgtggctctttccatgtgtagtttccaatgaaacaggaaggactctaattgagtgcctgcccacatctctacagctccacaccttccactaagggcacaataagacctccactgtgagaggctccacagtgtactacgttggtgatggcatattctgaggggctgatctgcagaaaaggccaagtgaaaagtcacccaataatgagaaaggaggaagatggcatgtagaatgcatgaataggaaattatattgagaaatccagatgtgcagttgtgcaagagcaagctggtgtggatttttgaatggatattctgaagacaactaggtgccggatgccatgttgtcagctgccctatggagagacccatgtgggcaaggaactctggccaacagatggtctgggtggtctctggtccacagccagggaagagctgagcacctctgaccagaggcttatgacaaactgaatcctgccagcaagacaccaaccaatccagaagtatcagccatctccctatgcagggtgccagaggaccaggttctagcccattcattgctggattgcggaggactccaggtggtctgggaaaaggagtggagcaacatgcagcatgtcccagcaaagcttcgcaaagatgtcagtattaattgtcaccatcctccagggagaaagcaacagcccacaattgcctgcattttctttcctcttcaaaaccacttctgctccaaagaccatgaacctgaactgaagaaacgactccttcctgctggtgtgagataattcagtctccatgatgtcttaatcctgggcctcccttaattgacttctaactgtgctgaactgtggctgctaggagttgcaatgtggatcgcaatttacaaggcactggaatcgtttcttgtcttcaaattagtcctgagctgtactggagaaagaaaaaaaaggggcctttacccttcttgctgtcttgtcaccacaagtgagactttcttacagtctcagaatggatggttgccttttaacaatttagttagggacagaaaggaaaaagagttagggttgccaatacttcgtcaattttgtcttaataaagttgcctcacatggccaaaaaaaaaa

SEQ ID NO: 128 - DNA, 2166 bp, Homo sapiens
  source 1..2166: mol_type = unassigned DNA
atggggactcctgcttctggaaggaaaagaacacctgtgaaagaccgattttctgcagaagatgaagctttgagtaacattgccagagaggcagaggcaaggctggcagcaaaacgggctgcccgggcagaagcaagagatatacgcatgagagaactggaacgacaacaaaaagagtactctcttcattcctttgatcggaagtggggacagattcagaagtggctggaagattcggaaagggccaggtattcccaccggtccagtcaccatcgtccttatctgggagttgaggatgcattgtccattcgaagtgttggcagtcacaggtatgatatgttcaaggatagatcatcaagactttcatcattaaatcattcttacagtcactctcatggaatgaagaagaggtcttctgattctcataaagacctactgagtggcctctactttgaccagagaaactatagcagtcttagacatagcaaacccacctctgcctactacactcggcagtcttcttccctgtacagtgaccctctggcaacatataagagtgacagggcctctcctactgcaaattctggtctgctgagaagtgccagtctggcatcattgtacaatggtggattatataacccttatggtcctcgaactccatctgaatgcagttattattcatcaagaataagttcagcccgaagcagtccagggtttaccaacgatgacactgcaagcattgtgtcttctgatcgtgccagtcgtggacgaagggagagtgtggtatctgccgctgattatttcagtcgctccaatcgtaggggaagtgttgtctctgaggtggatgatatcagtatcccagatttgtccagcttggatgaaaaatctgacaaacagtatgctgaaaattatacaagaccttcatctcgaaattctgcctcagcaacaacccctctaagtggaaactcatccagacgaggaagtggggacaccagcagcttaatagatccagacacttcattaagtgaattgcgggatatctatgaccttaaggaccagatacaggatgtagaagggagatacatgcaggggcttaaagaactaaaggaatctttgtctgaagtggaagaaaaatacaagaaagccatggtttccaatgcacagttagacaatgagaagaacaatttgatctaccaagtagacacactcaaggatgttattgaagagcaggaggaacagatggcagaattttatagagaaaatgaagaaaaatcaaaggagttagaaaggcagaaacatatgtgtagtgtgctgcagcataagatggaagaacttaaagaaggcctgcggcaaagagatgagcttattgaggagaagcagcgcatgcagcagaaaatagacaccatgacaaaagaggtgtttgacctccaggagacacttctttggaaagataaaaaaattggggccctagagaaacagaaagaatacattgcctgccttaggaatgagcgagatatgctcagagaggagctggctgacctgcaggagacagtgaagacgggagagaaacatggcttagttataatccccgatggcactcccaatggtgatgtcagtcatgaaccagtggctggagccatcactgttgtgtctcaggaagctgctcaggtcttggagtcagcaggagaagggccattagatgtaaggctacgaaaacttgctggagagaaggaagaactactgtcacagattagaaaactgaagcttcagttagaggaggaacgacagaaatgctccaggaatgatggcacagtgggtgacctggcaggactgcagaatggctcagacttgcagttcatcgaaatgcagagagatgccaatagacaaattagcgaatacaaatttaagctttcaaaagcagaacaggatataactaccttggagcaaagtattagccggcttgagggacaggttctgagatataaaactgctgctgagaatgctgagaaagttgaagatgaattgaaagcagaaaaacggaagctacaacgagagttacgaacagcactggacaagattgaggagatggagatgaccaacagccacctggccaagcggctggagaagatgaaggccaataggacagcacttctggcccagcagtag

SEQ ID NO: 129 - DNA, 447 bp, Homo sapiens
  source 1..447: mol_type = unassigned DNA
atggctgtggctagcgatttctacctgcgctactacgtagggcacaagggcaagtttgggcacgagtttctggagttcgaatttcggccggacggaaagcttagatatgccaacaacagcaattacaaaaatgatgtcatgatcagaaaagaggcttatgtgcacaagagtgtaatggaagaactgaagagaattattgatgacagtgaaattacaaaagaagatgatgctttgtggcctccccctgatagggttggccgacaggagcttgaaattgtaattggagatgagcacatatcttttaccacatcaaaaataggttctcttattgatgtaaatcagtcaaaggatcctgaaggccttcgagtattttactatttggtacaagacttgaaatgtttagttttcagtcttattggattacacttcaagattaaaccaatttaa

SEQ ID NO: 130 - DNA, 3414 bp, Homo sapiens
  source 1..3414: mol_type = unassigned DNA
atgcctctgtccagccacctgctgcccgccttggtcctgttcctggcagggtcctcaggctgggcctgggtccccaaccactgcaggagccctggccaggccgtgtgcaacttcgtgtgtgactgcagggactgctcagatgaggcccagtgtggttaccacggggcctcgcccaccctgggcgcccccttcgcctgtgacttcgagcaggacccctgcggctggcgggacattagtacctcaggctacagctggctccgagacagggcaggggccgcactggagggtcctgggcctcactcagaccacacactgggcaccgacttgggctggtacatggccgttggaacccaccgagggaaagaggcatccaccgcagccctgcgctcgccaaccctgcgagaggcagcctcctcttgcaagctgaggctctggtaccacgcggcctctggagatgtggctgaactgcgggtggagctgacccatggcgcagagaccctgaccctgtggcagagcacagggccctggggccctggctggcaggagttggcagtgaccacaggccgcatccggggtgacttccgagtgaccttctctgccacccgaaatgccacccacaggggcgctgtggctctagatgacctagagttctgggactgtggtctgcccaccccccaggccaactgtcccccgggacaccaccactgccagaacaaggtctgcgtggagccccagcagctgtgcgacggggaagacaactgcggggacctgtctgatgagaacccactcacctgtggccgccacatagccaccgactttgagacaggcctgggcccatggaaccgctcggaaggctggtcccggaaccaccgcgctggtggtcctgagcgcccctcctggccacgccgtgaccacagccggaacagtgcacagggctccttcctggtctccgtggccgagcctggcacccctgctatactctccagccccgaattccaagcctcaggcacctccaactgctcgctggtcttctatcagtacctgagtgggtctgaggctggctgcctccagctgttcctgcagactctggggcccggcgccccccgggcccccgtcctgctgcggaggcgccgaggggagctggggaccgcctgggtccgagaccgtgttgacatccagagcgcctaccccttccagatcctcctggccgggcagacaggcccggggggcgtcgtgggtctggacgacctcatcctgtctgaccactgcagaccagtctcggaggtgtccaccctgcagccgctgcctcctgggccccgggccccagccccccagcccctgccgcccagctcgcggctccaggattcctgcaagcaggggcatcttgcctgcggggacctgtgtgtgcccccggaacaactgtgtgacttcgaggagcagtgcgcagggggcgaggacgagcaggcctgtggcaccacagactttgagtcccccgaggctgggggctgggaggacgccagcgtggggcggctgcagtggcggcgtgtctcagcccaggagagccaggggtccagtgcagctgctgctgggcacttcctgtctctgcagcgggcctgggggcagctaggcgctgaggcccgggtcctcacacccctccttggcccttctggccccagctgtgaactccacctggcttattatttacagagccagccccgagaggtctcctgtaactttgagcgggacacatgcagctggtacccaggccacctctcagacacacactggcgctgggtggagagccgcggccctgaccacgaccacaccacaggccaaggccactttgtgctcctggaccccacagaccccctggcctggggccacagtgcccacctgctctccaggccccaggtgccagcagcacccacggagtgtctcagcttctggtaccacctccatgggccccagattgggactctgcgcctagccatgagacgggaaggggaggagacacacctgtggtcgcggtcaggcacccagggcaaccgctggcacgaggcctgggccaccctttcccaccagcctggctcccatgcccagtaccagctgctgttcgagggcctccgggacggataccacggcaccatggcgctggacgatgtggccgtgcggccgggcccctgctgggcccctaattactgctcctttgaggactcagactgcggcttctcccctggaggccaaggtctctggaggcggcaggccaatgcctcgggccatgctgcctggggccccccaacagaccataccactgagacagcccaagggcactacatggtggtggacacaagcccagacgcactaccccggggccagacggcctccctgacctccaaggagcacaggcccctggcccagcctgcttgtctgaccttctggtaccacgggagcctccgcagcccaggcaccctgcgggtctacctggaggagcgcgggaggcaccaggtgctcagcctcagtgcccacggcgggcttgcctggcgcctgggcagcatggacgtgcaggccgagcgagcctggagggtggtgtttgaggcagtggccgcaggcgtggcacactcctacgtggctctggatgatctgctcctccaggacgggccctgccctcagccaggttcctgtgattttgagtctggcctgtgtggctggagccacctggcctggcccggcctgggcggatacagctgggactggggcgggggagccaccccctctcgttacccccagccccctgtggaccacaccctgggcacagaggcaggccactttgccttctttgaaactggcgtgctgggccccgggggccgggccgcctggctgcgcagcgagcctctgccggccaccccagcctcctgcctccgcttctggtaccacatgggttttcctgagcacttctacaagggggagctgaaggtactgctgcacagtgctcagggccagctggctgtgtggggcgcaggcgggcatcggcggcaccagtggctggaggcccaggtggaggtagccagtgccaaggagttccagatcgtgtttgaagccactctgggcggccagccagccctggggcccattgccctggatgacgtggagtatctggctgggcagcattgccagcagcctgcccccagcccggggaacacagccgcacccgggtctgtgccagctgtggttggcagtgccctcctattgctcatgctcctggtgctgctgggacttgggggacggcgctggctgcagaagaaggggagctgccccttccagagcaacacagaggccacagcccctggctttgacaacatccttttcaatgcggatggtgtcaccctcccggcatctgtcaccagtgatccgtag

SEQ ID NO: 131 - DNA, 2640 bp, Homo sapiens
  source 1..2640: mol_type = unassigned DNA
atgcgcctccacctgctcctgctgctcgcgctgtgcggtgcaggcaccaccgccgcggagctcagttacagcttgcgtggcaactggagcatctgcaatgggaacggctcgctggagctgcccggggcggtccctggctgcgtgcacagcgccttgttccagcagggcctgatccaggattcttactacagatttaatgaccttaactacagatgggtctctttggataactggacctatagcaaagaatttaaaatcccctttgaaattagcaaatggcaaaaagtaaatttgattcttgagggagtggatacggtttcaaaaatcctgttcaatgaagtcactattggggaaacagacaatatgttcaatagatatagctttgatattaccaacgtggtcagggacgtgaactccattgagctgcgtttccagtcagcggtgttgtatgcagcacagcagagcaaagctcacactcgctaccaggttcccccagactgccctccacttgtgcagaagggtgaatgccatgtcaactttgttcggaaggagcaatgttcctttagttgggactgggggccttcctttcctacccagggaatctggaaagatgttagaattgaagcctataatatttgtcacctgaactacttcacattttccccaatatatgataagagtgcccaggagtggaatctggaaatagagtctacatttgatgttgtcagctcaaagccagttggtggtcaagtgatcgtagccatccctaagttgcaaacacaacagacatacagcattgaacttcaacctgggaaaaggattgttgagctatttgtgaacattagcaagaatattactgtagaaacttggtggcctcatggacatggaaaccagactgggtacaacatgactgttctttttgaactggatggaggcttaaatattgaaaaatcagctaaggtttattttaggacagtggaacttatagaagagcctataaaagggtctcctggtttgagtttctatttcaaaattaatggatttcccatatttctaaaaggctcaaactggatcccagcagattcattccaggaccgagtaacctctgagttgttacggctccttttacagtctgttgtggatgctaatatgaatactcttcgggtttggggaggaggaatttatgagcaggatgaattctatgaactctgtgatgaactaggaataatggtatggcaggattttatgtttgcctgtgccctttatccaactgatcagggcttcctggattcagtgacagcagaagttgcctaccagatcaagagactgaaatctcatccttctatcatcatatggagtggcaataatgaaaatgaggaggcgctgatgatgaattggtatcatatcagtttcactgaccggccaatctacatcaaggactatgtgacactctatgtgaaaaacatcagagagctcgtactggcaggagacaagagtcgtccttttattacgtccagtcctacaaatggggctgaaactgttgcagaagcctgggtctctcaaaaccctaatagcaattattttggtgatgtacatttttatgactatatcagtgattgctggaactggaaagttttcccaaaagctcgatttgcatctgaatatggatatcagtcctggccgtccttcagtacattagaaaaggtctcgtctacagaggactggtctttcaatagcaagttttcacttcatcgacaacatcacgaaggtggtaacaaacaaatgctttatcaggctggacttcatttcaaactcccccaaagcacagatccattacgcacatttaaagataccatctaccttactcaggtgatgcaggcccagtgtgtcaaaacagaaactgaattctaccgccgtagtcgcagcgagatagtggatcagcaagggcacacgatgggggcactttattggcagttgaatgacatctggcaagctccttcctgggcttctcttgagtacggaggaaagtggaaaatgcttcattactttgctcagaatttctttgctccactgttgccagtaggctttgagaatgaaaacacgttctatatctatggtgtgtcagatcttcactcggattattcgatgacactcagtgtgagagtccatacatggagctccctggagcccgtgtgctctcgtgtgactgaacgttttgtgatgaaaggaggagaggctgtctgcctttatgaggagccagtgtctgaattgctgaggagatgtgggaattgcacacgggaaagctgtgtggtttccttttacctttcagctgaccatgaactcctgagcccgaccaactaccacttcttgtcctcaccgaaggaggccgtggggctctgcaaggcgcagatcactgccatcatctctcagcaaggtgacatatttgtttttgacctggagacctcagctgtcgctccctttgtttggttggatgtaggaagcatcccagggagatttagtgacaatggtttcctcatgactgagaagacacgaactatattattttacccttgggagcccaccagcaagaatgagttggagcaatcttttcatgtgacctccttaacagatatttactga

SEQ ID NO: 132 - DNA, 3357 bp, Homo sapiens
  source 1..3357: mol_type = unassigned DNA
atggagccctccagagcgcttctcggctgcctagcgagcgccgccgctgccgccccgccgggggaggatggagcaggggccggggccgaggaggaggaggaggaggaggaggaggcggcggcggcggtgggccccggggagctgggctgcgacgcgccgctgccctactggacggccgtgttcgagtacgaggcggcgggcgaggacgagctgaccctgcggctgggcgacgtggtggaggtgctgtccaaggactcgcaggtgtccggcgacgagggctggtggaccgggcagctgaaccagcgggtgggcatcttccccagcaactacgtgaccccgcgcagcgccttctccagccgctgccagcccggcggcgaggaccccagttgctacccgcccattcagttgttagaaattgattttgcggagctcaccttggaagagattattggcatcgggggctttgggaaggtctatcgtgctttctggataggggatgaggttgctgtgaaagcagctcgccacgaccctgatgaggacatcagccagaccatagagaatgttcgccaagaggccaagctcttcgccatgctgaagcaccccaacatcattgccctaagaggggtatgtctgaaggagcccaacctctgcttggtcatggagtttgctcgtggaggacctttgaatagagtgttatctgggaaaaggattcccccagacatcctggtgaattgggctgtgcagattgccagagggatgaactacttacatgatgaggcaattgttcccatcatccaccgcgaccttaagtccagcaacatattgatcctccagaaggtggagaatggagacctgagcaacaagattctgaagatcactgattttggcctggctcgggaatggcaccgaaccaccaagatgagtgcggcagggacgtatgcttggatggcacccgaagtcatccgggcctccatgttttccaaaggcagtgatgtgtggagctatggggtgctactttgggagttgctgactggtgaggtgccctttcgaggcattgatggcttagcagtcgcttatggagtggccatgaacaaactcgcccttcctattccttctacgtgcccagaaccttttgccaaactcatggaagactgctggaatcctgatccccactcacgaccatctttcacgaatatcctggaccagctaaccaccatagaggagtctggtttctttgaaatgcccaaggactccttccactgcctgcaggacaactggaaacacgagattcaggagatgtttgaccaactcagggccaaagaaaaggaacttcgcacctgggaggaggagctgacgcgggctgcactgcagcagaagaaccaggaggaactgctgcggcgtcgggagcaggagctggccgagcgggagattgacatcctggaacgggagctcaacatcatcatccaccagctgtgccaggagaagccccgggtgaagaaacgcaagggcaagttcaggaagagccggctgaagctcaaggatggcaaccgcatcagcctcccttctgatttccagcacaagttcacggtgcaggcctcccctaccatggataaaaggaagagtcttatcaacagccgctccagtcctcctgcaagccccaccatcattcctcgccttcgagccatccagttgacaccaggtgaaagcagcaaaacctggggcaggagctcagtcgtcccaaaggaggaaggggaggaggaggagaagagggccccaaagaagaagggacggacgtgggggccagggacgcttggtcagaaggagcttgcctcgggagatgaaggatcccctcagagacgtgagaaagctaatggtttaagtaccccatcagaatctccacatttccacttgggcctcaagtccctggtagatggatataagcagtggtcgtccagtgcccccaacctggtgaagggcccaaggagtagcccggccctgccagggttcaccagccttatggagatggccttgctggcagccagttgggtggtgcccatcgacattgaagaggatgaggacagtgaaggcccagggagtggagagagtcgcctacagcattcacccagccagtcctacctctgtatcccattccctcgtggagaggatggcgatggcccctccagtgatggaatccatgaggagcccaccccagtcaactcggccacgagtacccctcagctgacgccaaccaacagcctcaagcggggcggtgcccaccaccgccgctgcgaggtggctctgctcggctgtggggctgttctggcagccacaggcctagggtttgacttgctggaagctggcaagtgccagctgcttcccctggaggagcctgagccaccagcccgggaggagaagaaaagacgggagggtctttttcagaggtccagccgtcctcgtcggagcaccagccccccatcccgaaagcttttcaagaaggaggagcccatgctgttgctaggagacccctctgcctccctgacgctgctctccctctcctccatctccgagtgcaactccacacgctccctgctgcgctccgacagcgatgaaattgtcgtgtatgagatgccagtcagcccagtcgaggcccctcccctgagtccatgtacccacaaccccctggtcaatgtccgagtagagcgcttcaaacgagatcctaaccaatctctgactcccacccatgtcaccctcaccaccccctcgcagcccagcagtcaccggcggactccttctgatggggcccttaagccagagactctcctagccagcaggagcccctccagcaatgggttgagccccagtcctggagcaggaatgttgaaaacccccagtcccagccgagacccaggtgaattcccccgtctccctgaccccaatgtggtcttccccccaaccccaaggcgctggaacactcagcaggactctaccttggagagacccaagactctggagtttctgcctcggccgcgtccttctgccaaccggcaacggctggacccttggtggtttgtgtcccccagccatgcccgcagcacctccccagccaacagctccagcacagagacgcccagcaacctggactcctgctttgctagcagtagcagcactgtagaggagcggcctggacttccagccctgctcccgttccaggcagggccgctgcccccgactgagcggacgctcctggacctggatgcagaggggcagagtcaggacagcaccgtgccgctgtgcagagcggaactgaacacacacaggcctgccccttatgagatccagcaggagttctggtcttag

SEQ ID NO: 133 - DNA, 6633 bp, Homo sapiens
  source 1..6633: mol_type = unassigned DNA
atgactgcggcagcgaactgggtggcgaacggggcgagcctggaggattgtcactccaacctcttttcgctggctgaactcacgggaatcaaatggcgtaggtacaattttggagggcatggggactgtggacccataatttcagccccagcccaagatgatccaattctgttaagtttcatccgctgtctgcaagctaacctgctttgtgtatggcgtcgtgatgtcaaaccagattgcaaagagttatggatattctggtggggagatgaacccaacctagtgggtgtaatacatcatgaactgcaggttgtggaagaaggactctgggaaaatggcctttcctatgaatgtaggacgctgctcttcaaagcgatccacaatctgttagaaaggtgcctaatggataagaacttcgttaggattgggaaatggtttgtccgaccctacgaaaaggatgaaaagccagtcaacaaaagtgagcatttgtcctgtgctttcacattctttctgcatggagaaagtaatgtatgcacaagtgtggagattgcccagcaccagccaatttatttgatcaatgaggagcatatacacatggctcagtcttcacctgcaccatttcaagtactggtaagtccttatggcttaaatgggacgctaacaggccaagcatacaagatgtcagacccagccactcgtaagttgattgaggaatggcagtatttctacccgatggtgctaaaaaagaaagaagaatcgaaagaggaagacgagttgggatatgatgatgatttccctgtggcagttgaagtaattgttggtggtgttcggatggtttacccttcagcatttgttttgatctctcagaatgacatcccggttcctcagagtgttgccagtgctggaggccacattgcagttgggcagcaagggcttggtagtgtgaaggacccaagtaactgtgggatgcctctgacccctcccacctctccagaacaggctatcctaggtgagagtggaggtatgcagagtgctgccagtcacctggtttcccaagatggagggatgataacgatgcacagtccaaagagatcggggaagattcctccaaaactccacaatcatatggtccatcgagtctggaaggaatgcatcctcaacagaacccagtccaagaggagccaaatgtcaactccaactcttgaagaagagcctgctagcaatcctgctacttgggattttgtggatccaacccaaagagtcagctgttcttgttccaggcataagcttttaaaacgttgtgcagtcgggcccaatcgacctcccacagtatctcaaccagggttcagtgcaggaccatcatcatcttcatctttaccacctcctgcttcttctaagcacaaaacagcagaaagacaggaaaaaggagacaagctgcaaaagagacccttaataccatttcaccataggccctctgtggccgaagaattatgcatggagcaagatacaccaggacagaaactagggttggcagggatagactcctccttagaggtgtctagcagtaggaaatatgataagcaaatggccgtgccttccagaaatacaagcaagcaaatgaatctgaatcctatggattcacctcattcccctatatcccctctgccaccaacactcagccctcagccacgaggtcaggaaacagagagtttggacccaccatcggtccctgtgaatccagccctttatggaaatggactagaactccagcagttgtctactctggatgacagaactgtcctcgtaggccaaagactgcctctcatggcagaggtcagcgagacagccttatattgtgggattaggccctcgaacccggagtcatcagaaaagtggtggcatagttatcgtctcccacccagtgatgatgctgagttcaggcctccagagctccagggtgagagatgtgatgccaaaatggaggtaaactcagagagcactgcattgcaaagactcttagcacaacctaacaaacggtttaaaatctggcaagacaaacagccccagttgcagccactccacttccttgacccattgcctctatcacaacaacctggagacagtttgggagaagtgaatgacccatatacctttgaagatggtgacataaaatacatctttacagccaacaagaaatgcaaacaagggacggagaaagattccctgaaaaagaataagtcagaggatggatttggtaccaaggatgtcactacaccaggtcattccacgccggtgcctgatgggaaaaatgccatgtctattttcagttctgctactaaaacagatgtccggcaggataatgctgctggcagagctggctccagtagccttacacaggtaacagatttggcaccttccctgcatgacttagacaacatctttgataattctgatgacgacgaacttggggctgtatcacctgctctgcgctcatcaaaaatgcctgcagttgggacagaagaccgacctcttgggaaggatggaagagctgctgttccttatccaccaacagttgcagacttgcaaaggatgtttcccactccaccatctttggaacagcatcctgcattttctcctgtgatgaattataaagatgggatcagctcagagacagtgacagcattaggcatgatggagagccctatggtcagtatggtttcaacacaactcacagaattcaaaatggaagtggaagatggattaggaagtcccaagcccgaggaaattaaggacttttcatatgtgcacaaagttccatcctttcaaccttttgtgggatcctccatgtttgctccactgaagatgttgccgagccattgtttgctacctctgaagatacctgatgcctgtctgtttcggccttcatgggcaattcctcctaaaattgaacaactgcccatgccccctgcagccactttcattagagatggctacaataacgtgcctagtgttgggagcctagcagatccagactatctgaacacaccacagatgaacacacccgtgacgttgaacagcgctgccccagccagcaatagtggggcaggagtcctaccatctccagcaacccctcgcttctctgtccccacaccacgaacccccaggaccccaagaactcccagaggtgggggcactgccagtggtcaagggtctgttaagtatgatagcaccgatcaaggatcaccagcctccaccccctctactacacggcccctcaactctgtggagcccgccaccatgcagccaattcccgaagcccacagcctctatgttaccctgattctctccgattccgtgatgaatatctttaaagacagaaactttgacagctgttgcatctgtgcctgcaacatgaacatcaaaggggcggatgtcgggctttacatccccgattcttccaatgaggaccagtaccgctgtacctgtgggtttagtgcgattatgaaccgcaaacttggctacaattcaggactcttccttgaagatgagttggatatttttgggaagaattctgatattggtcaggctgcagagaggcgcttaatgatgtgtcagtccaccttccttcctcaggtggaaggaaccaaaaaaccccaggagccacccataagccttctcctcctcctccagaatcaacacacacaaccttttgcttcactgaatttcctggactacatttcctctaacaatcgccaaactcttccctgtgtaagctggagttatgaccgggtgcaagcagataataatgattactggacggaatgctttaatgcgttggagcaggggcggcagtatgtggataaccccactggtggaaaagtggacgaagctctggtgagaagtgccactgtgcactcttggcctcacagcaatgtgctggacatcagcatgctctcctcccaggatgtggttcgtatgctgttgtccctgcagccctttctccaagatgccatccaaaagaagcgcacgggcaggacctgggagaacatccagcatgtgcagggaccactcacttggcagcagttccataaaatggcaggacggggaacctacggttcggaagaatctcctgagccgttgcccatccccactctgctggtaggctatgacaaggatttcctcaccatctcgccattctccttgccgttttgggagaggctcttgttggacccatatgggggccaccgtgatgttgcctatattgtggtgtgtccagaaaatgaggccttgctcgaaggagccaaaactttcttcagggacttgagtgctgtatacgagatgtgtaggcttgggcagcacaagcccatctgcaaagtgctacgtgacgggatcatgcgcgtgggaaaaactgtggcacagaagctgacagatgagcttgtgagtgagtggtttaaccagccttggagcggcgaggagaatgacaatcattccagactcaaactttatgcgcaagtttgccgccatcacctagcaccttatttagccactctgcagcttgatagcagcctattgataccacctaaataccagaccccaccagcagcagcacagggacaagctacgccagggaatgctgggcccttagctccaaatggatcagcagctcccccagctggcagtgcatttaatcccacctcgaatagtagttctacaaatcctgcagcaagtagttctgcatctggttcctctgtgccaccggtctcatcgtctgcctctgctcctggtattagccagataagcactacctcttcttcaggattcagtggtagtgttggagggcagaaccccagcactgggggcatttctgcggatagaacgcaagggaacataggctgtggtggagacactgaccctgggcagagctcttctcagccctcacaggatggacaagagagtgttacagaaagggagagaataggaattcccacggagcctgactctgcagacagccatgcccaccctccagctgttgtcatttacatggtggacccgttcacgtatgctgcagaggaggactccacttctgggaacttttggctgttgagcttgatgcgctgctacacagaaatgctggataatttacctgagcatatgagaaattctttcattctccagattgtgccttgccagtacatgctgcagacaatgaaggatgagcaagttttctacattcaatacttgaagtccatggcattttcagtgtactgccagtgcaggcgaccactgcctacacagatccacattaaatccctcacgggatttgggcctgcagccagcattgagatgaccctcaagaaccctgagcggcccagcccaatccagctttactcccctccctttatattggccccaatcaaagacaagcagacagagctgggagagacgtttggtgaggcgagccagaaatacaatgtgctcttcgtgggctattgtctgtctcacgaccagcgctggcttttggcttcctgcactgacctccatggggaattattagagacctgcgttgtaaatattgctttaccaaacaggtcacggaggagtaaagtatctgcacgtaaaattggactacagaagttatgggagtggtgcatagggattgtccaaatgacatctctaccctggagagttgtaatcgggcgacttgggcgtcttggccatggggagcttaaagattggagtatcctccttggagaatgttcactacagacaatcagcaaaaagctcaaggatgtgtgccggatgtgtggaatctctgccgcagactctccttctatccttagtgcctgcctggttgccatggagccccaggggtcctttgtagtgatgccagatgctgtcacaatgggctctgtttttggccgaagtactgcactgaacatgcagtcatctcagctcaacacccctcaagatgcttcttgtacacacatcttggtgttcccaacatcatcaaccatccaggtggctccagccaactaccccaatgaagatgggtttagccccaacaatgatgatatgtttgttgaccttccattcccagatgatatggacaatgatattggcatattaatgactgggaacctccattcctctcccaactcttccccagtaccctccccaggctctccttctggaattggtgtgggctctcacttccagcatagtcggagccagggtgagcgtcttctttctagagaagcaccagaggagctaaagcagcagcccctggcccttgggtattttgtatcaactgccaaagctgagaatcttccccagtggttttggtcatcgtgtccccaggctcaaaaccagtgccctctcttcttaaaggcttcgctgcatcaccacatttcagtagcacagacagacgaacttctgcctgccaggaattctcagcgggttccacaccctcttgactccaaaaccacgtcggatgttttaaggtttgttttggagcagtacaacgctctgtcctggctcacgtgcaatccggccacccaggaccgtacttcctgccttcccgtccactttgtggtgctcactcagttgtacaatgccatcatgaatatactttaa

SEQ ID NO: 134 - DNA, 1812 bp, Homo sapiens
  source 1..1812: mol_type = unassigned DNA
atggcggcttcttgccctctcccggtgaccccggacctgcccacgctgcgtgccaagttgcagggactgctgcagttcctgagggatgccctgtccatttccaatgcacataccgtggatttctacacagaatccgtgtgggaggagctggtcgacttgccaccggagacagtgctggctgcgctgaggaagtcagcgtcggagacggaggccctgccctcagagacgcgccccctagtggaagcagagtgggaagcaggtatgactgattttcccaaaatattttgtgaaacttctcagaagttggtgagtgtggaagcctttgctctggctgcgaaatactattctgtacaaaacttgggaatatgtactccttttgaacagttgcttgtagcccttcgaggaaatcaaaaccagagaattggtgaaaatcagaaggcagttgagtttatgaatatgaagaaatctcatgaagttcaggcaatgtcagagctgatcagcagtattgctgactactatggaataaagcaggtgattgacttgggttccggtaaaggctacctaagctcttttttgtccttgaagtatggcttaaaagtttatggaattgattcttcaaataccaatactcatggagctgaggagagaaacagaaaattgaagaaacattggaaactctgtcatgctcagtcaagattagatgtcaatggactagcattaaaaatggcaaaagaaaggaaagtgcaaaataaagttaaaaataaagctgatactgaggaagtgtttaacaacagtcctacaaatcaagaaaagatgcctacctcagctattttgcctgatttttctggctctgtaatttctaatatcagaaaccaaatggaaacccttcattctcagccacatcaagaagaaaatttgtgttttgaaaattccttttctcttataaaccttttgcctattaatgctgtagagcctacttcttcacagcaaatacccaacagagaaacatctgaagccaataaagagagaagaaaaatgacatcaaagtcaagtgaatcaaatatatattcacctttaacctcttttatcactgctgattcagaactccatgacattattaaagatttggaggattgtttgatggtgggtctccacacttgtggtgatctggctccaaatactttgcgaatatttacctccaactctgaaatcaagggagtttgcagtgtgggttgttgctaccacctcttatctgaagaatttgaaaaccagcataaagaacgtactcaggaaaagtggggatttccaatgtgccactatttaaaggaagagagatggtgctgtggtcgtaatgccagaatgtcagcatgtttggcattggagcgggttgcagctggccaagggctgcctactgaatcactcttctatcgtgctgttcttcaggatattattaaagattgttatggcatcaccaaatgtgatcggcatgttggtaaaatttattccaaatgttcttcttttctggattatgtcagacggtctctaaagaagcttggattagatgagtccaagctgccagaaaaaattataatgaactactacgagaagtataagcctcgaatgaatgagctggaagcttttaatatgttgaaagttgtactggctccctgtatagagactttgattcttctggatcgactttgttacctgaaagagcaggaagatattgcatggtctgctcttgtgaagttgtttgatcccgtgaaatctcccagatgttatgctgttattgccctgaagaagcagcagtga

SEQ ID NO: 135 - DNA, 2715 bp, Homo sapiens
  source 1..2715: mol_type = unassigned DNA
atggatcggtacctgctgctggtgatctggggggaaggaaaattcccgtcggcggccagtagggaggcagaacatgggccagaggtgtcgtcgggtgagggtactgagaatcagccggacttcacagcagcaaatgtttatcacctcttgaaaagaagcattagtgcttcaattaatccagaagatagtactttccctgcctgttcagtgggaggtatacctggttccaagaagtggttctttgcagtgcaggcaatatatggattttatcagttttgtagttctgattggcaagagatacattttgatacagaaaaagataaaattgaagatgttcttcaaacgaatatcgaagaatgtttgggtgctgttgagtgttttgaagaagaagacagtaatagcagggaatcattatccttggctgatctctatgaagaagctgcagaaaatttgcatcagctgtcagacaagcttcctgctcctggtagagcaatggtagatataatactgttgctttctgacaaagatcctcctaaattgaaagactatttacctactgtaggagcattaaaacatttgagagaatggtattcagcaaagatcactatagcaggaaatcattgtgaaataaactgtcagaaaattgcagaatacctttctgctaatgttgtatctttagaagatctcagaaatgttattgactcaaaggaattatggagggggaaaatacagatatgggaaagaaagtttggatttgaaattagttttcctgaattttgtttaaagggagtcacacttaagaattttagtacttctaatttaaatactgacttccttgccaaaaagatcataccatcaaaggataagaatattttgccaaaggttttccattattatggccctgctttagaatttgtgcagatgataaaattatcagatctaccctcctgctatatgtcggatattgaatttgagttaggattgacaaacagtaccaaacagaattctgtgttgctgttggagcagatttcttctctgtgtagcaaggttggtgctctttttgtattgccatgtaccattagtaacatactgattccacctcccaaccaactcagttcaagaaaatggaaggaatatatagctaaaaagcctaaaacaatcagtgttccagatgttgaagtgaaaggagagtgttctagctattatctcttgttacaaggtaatggcaatagaagatgtaaagccacattgattcactcagccaaccagatcaatggctcatttgcactcaatttaattcatggaaagatgaaaacaaagacagaagaagccaaattgagttttccttttgacttattatcacttccacatttttctggggagcagattgtacagagagagaaacagttagctaatgttcaagttttagctttggaagaatgcctaaaaagacgaaagttggcaaagcagcctgaaacagtttctgttgctgaactcaaaagtctgttagtactcacaaggaaacactttttagattattttgatgctgtgattcctaaaatgattctaagaaagatggacaaaattaaaaccttcaatatattaaatgattttagtccagtggaacctaattcctcaagtctaatggaaaccaatcctctggaatggccagaaaggcatgttcttcaaaatttggaaacttttgaaaaaactaaacaaaaaatgagaactggttcattacctcattcatctgaacagttgctgggccacaaagagggtcctcgggactcaatcacattgttggatgctaaagaattgctgaagtactttacctcagatggattacccattggagatcttcaacctttaccgattcaaaagggggaaaagacttttgttttgacaccagaacttagtcctgggaaacttcaggtcttaccttttgagaaagcctcagtatgtcattatcatggaattgaatattgcttggatgaccgaaaagctttggaaagagatggaggattttctgaacttcagtctcgtcttattcgttatgaaactcaaactacctgcaccagagaaagttttccagtacctactgtgttgagccctcttccatctcctgtagtttcgtcagatcctggaagtgtccctgacggagaagttttacaaaatgaacttcgaactgaagtatcccgattgaaacggagatctaaagatctgaattgcctttatcccagaaaaagacttgtgaaatctgaaagttcagagtctcttctttctcagacaactggtaatagtaatcactatcatcatcatgtgacatccagaaagccacaaacagaacggtccttaccagtgacttgtccattggttccaattcctagctgtgaaactccaaaacttgctacaaagaccagttcaggtcaaaaaagtatgcatgaatcaaaaacatcaaggcaaattaaggaatcaagatcacagaaacacacacggatactgaaagaagtagttactgaaaccctgaagaaacacagtattaccgagactcatgaatgtttcactgcatgcagccagcgtctctttgaaatctctaagttctatctaaaggatcttaaaacttcaaggggtctatttgaagaaatgaagaaaacagcaaacaacaatgctgtacaggtgattgactgggtattagaaaagacaagcaagaaatga

SEQ ID NO: 136 - DNA, 5931 bp, Homo sapiens
  source 1..5931: mol_type = unassigned DNA
atggcgcagagaactggactcgaggatccagagaggtatctctttgtggacagggctgtcatctacaaccctgccactcaagctgattggacagctaaaaagctagtgtggattccatcagaacgccatggttttgaggcagctagtatcaaagaagaacggggagatgaagttatggtggagttggcagagaatggaaagaaagcaatggtcaacaaagatgatattcagaagatgaacccacctaagttttccaaggtggaggatatggcagaattgacatgcttgaatgaagcttccgttttacataatctgaaggatcgctactattcaggactaatctatacttattctggactcttctgtgtagttataaacccttacaagaatcttccaatttactctgagaatattattgaaatgtacagagggaagaagcgtcatgagatgcctccacacatctatgctatatctgaatctgcttacagatgcatgcttcaagatcgtgaggaccagtcaattctttgcacgggtgagtcaggtgctgggaagacagaaaatacaaagaaagttattcagtaccttgcccatgttgcttcttcacataaaggaagaaaggaccataatattcctggggaacttgaacggcagcttttgcaagcaaatccaattctggaatcatttggaaatgcgaagactgtgaaaaatgataactcatctcgttttggcaaatttattcggatcaactttgatgtaactggctatatcgttggggccaacattgaaacataccttctggaaaagtctcgtgctgttcgtcaagcaaaagatgaacgtacttttcatatcttttaccagttgttatctggagcaggagaacacctaaagtctgatttgcttcttgaaggatttaataactacaggtttctctccaatggctatattcctattccgggacagcaagacaaagataatttccaggagaccatggaagcaatgcacataatgggcttctcccatgaagagattctgtcaatgcttaaagtagtatcttcagtgctacagtttggaaatatttctttcaaaaaggagagaaatactgatcaagcttccatgccagaaaatacagttgcgcagaagctctgccatcttcttgggatgaatgtgatggagtttactcgggccatcctgactccccggatcaaggtcggccgagactatgtgcaaaaagcccagaccaaagaacaggcagattttgcagtagaagcattggcaaaagctacctatgagcggctctttcgctggctcgttcatcgcatcaataaagctctggataggaccaaacgtcagggagcatctttcattggaatcctggatattgctggatttgaaatttttgagctgaactcctttgaacaactttgcatcaactacaccaatgagaagctgcagcagctgttcaaccacaccatgtttatcctagaacaagaggaataccagcgcgaaggcatcgagtggaacttcatcgatttcgggctggatctgcagccatgcatcgacctaatagagagacctgcgaaccctcctggtgtactggcccttttggatgaagaatgctggttccctaaagccacagataaaacctttgttgaaaaactggttcaagagcaaggttcccactccaagtttcagaaacctcgacaattaaaagacaaagctgatttttgcattatacattatgcagggaaggtggactataaggcagatgagtggctgatgaagaatatggaccccctgaatgacaacgtggccacccttttgcaccagtcatcagacagatttgtggcagagctttggaaagatgtggaccgtatcgtgggtctggatcaagtcactggtatgactgagacagcttttggctccgcatataaaaccaagaagggcatgtttcgtaccgttgggcaactctacaaagaatctctcaccaagctgatggcaactctccgaaacaccaaccctaactttgttcgttgtatcattccaaatcacgagaagagggctggaaaattggatccacacctagtcctagatcagcttcgctgtaacggtgtcctggaagggatccgaatctgtcgccagggcttccctaaccgaatagttttccaggaattcagacagagatatgagatcctaactccaaatgctattcctaaaggttttatggatggtaaacaggcctgtgaacgaatgatccgggctttagaattggacccaaacttgtacagaattggacagagcaagatatttttcagagctggagttctggcacacttagaggaagaaagagatttaaaaatcaccgatatcattatcttcttccaggccgtttgcagaggttacctggccagaaaggcctttgccaagaagcagcagcaactaagtgccttaaaggtcttgcagcggaactgtgccgcgtacctgaaattacggcactggcagtggtggcgagtcttcacaaaggtgaagccgcttctacaagtgactcgccaggaggaagaacttcaggccaaagatgaagagctgttgaaggtgaaggagaagcagacgaaggtggaaggagagctggaggagatggagcggaagcaccagcagcttttagaagagaagaatatccttgcagaacaactacaagcagagactgagctctttgctgaagcagaagagatgagggcaagacttgctgctaaaaagcaggaattagaagagattctacatgacttggagtctagggttgaagaagaagaagaaagaaaccaaatcctccaaaatgaaaagaaaaaaatgcaagcacatattcaggacctggaagaacagctagacgaggaggaaggggctcggcaaaagctgcagctggaaaaggtgacagcagaggccaagatcaagaagatggaagaggagattctgcttctcgaggaccaaaattccaagttcatcaaagaaaagaaactcatggaagatcgcattgctgagtgttcctctcagctggctgaagaggaagaaaaggcgaaaaacttggccaaaatcaggaataagcaagaagtgatgatctcagatttagaagaacgcttaaagaaggaagaaaagactcgtcaggaactggaaaaggccaaaagaaaactcgacggggagacgaccgacctgcaggaccagatcgcagagctgcaggcgcagattgatgagctcaagctgcagctggccaagaaggaggaggagctgcagggcgcactggccagaggtgatgatgaaacactccataagaacaatgcccttaaagttgtgcgagagctacaagcccaaattgctgaacttcaggaagactttgaatccgagaaggcttcacggaacaaggccgaaaagcagaaaagggacttgagtgaggaactggaagctctgaaaacagagctggaggacacgctggacaccacggcagcccagcaggaactacgtacaaaacgtgaacaagaagtggcagagctgaagaaagctcttgaggaggaaactaagaaccatgaagctcaaatccaggacatgagacaaagacacgcaacagccctggaggagctctcagagcagctggaacaggccaagcggttcaaagcaaatctagagaagaacaagcagggcctggagacagataacaaggagctggcgtgtgaggtgaaggtcctgcagcaggtcaaggctgagtctgagcacaagaggaagaagctcgacgcgcaggtccaggagctccatgccaaggtctctgaaggcgacaggctcagggtggagctggcggagaaagcaagtaagctgcagaatgagctagataatgtctccacccttctggaagaagcagagaagaagggtattaaatttgctaaggatgcagctagtcttgagtctcaactacaggatacacaggagcttcttcaggaggagacacgccagaaactaaacctgagcagtcggatccggcagctggaagaggagaagaacagtcttcaggagcagcaggaggaggaggaggaggccaggaagaacctggagaagcaagtgctggccctgcagtcccagttggctgataccaagaagaaagtagatgacgacctgggaacaattgaaagtctggaagaagccaagaagaagcttctgaaggacgcggaggccctgagccagcgcctggaggagaaggcactggcgtatgacaaactggagaagaccaagaaccgcctgcagcaggagctggacgacctcacggtggacctggaccaccagcgccaggtcgcctccaacttggagaagaagcagaagaagtttgaccagctgttagcagaagagaagagcatctctgctcgctatgccgaagagcgggaccgggccgaagccgaggccagagagaaagaaaccaaagccctgtcactggcccgggccctcgaggaagccctggaggccaaggaggagtttgagaggcagaacaagcagctccgagcagacatggaagacctcatgagctccaaagatgatgtgggaaaaaacgttcacgaacttgaaaaatccaaacgggccctagagcagcaggtggaggaaatgaggacccagctggaggagctggaagacgaactccaggccacggaagatgccaagcttcgtctggaggtcaacatgcaggccatgaaggcgcagttcgagagagacctgcaaaccagggatgagcagaatgaagagaagaagcggctgctgatcaaacaggtgcgggagctcgaggcggagctggaggatgagaggaaacagcgggcgcttgctgtagcttcaaagaaaaagatggagatagacctgaaggacctcgaagcccaaatcgaggctgcgaacaaagctcgggatgaggtgattaagcagctccgcaagctccaggctcagatgaaggattaccaacgtgaattagaagaagctcgtgcatccagagatgagatttttgctcaatccaaagagagtgaaaagaaattgaagagtctggaagcagaaatccttcaattgcaggaggaacttgcctcatctgagcgagcccgccgacacgccgagcaggagagagatgagctggcggacgagatcaccaacagcgcctctggcaagtccgcgctgctggatgagaagcggcgtctggaagctcggatcgcacagctggaggaggagctggaagaggagcagagcaacatggagctgctcaacgaccgcttccgcaagaccactctacaggtggacacactgaacgccgagctagcagccgagcgcagcgccgcccagaagagtgacaatgcacgccagcaactggagcggcagaacaaggagctgaaggccaagctgcaggaactcgagggtgctgtcaagtctaagttcaaggccaccatctcagccctggaggccaagattgggcagctggaggagcagcttgagcaggaagccaaggaacgagcagccgccaacaaattagtccgtcgcactgagaagaagctgaaagaaatcttcatgcaggttgaggatgagcgtcgacacgcggaccagtataaagagcagatggagaaggccaacgctcggatgaagcagcttaaacgccagctggaggaagcagaagaagaagcgacgcgtgccaacgcatctcggcgtaaactccagcgggaactggatgatgccaccgaggccaacgagggcctgagccgcgaggtcagcaccctgaagaaccggctgaggcggggtggccccatcagcttctcttccagccgatctggccggcgccagctgcaccttgaaggagcttccctggagctctccgacgatgacacagaaagtaagaccagtgatgtcaacgagacgcagccaccccagtcagagtaa

SEQ ID NO: 137 - DNA, 5229 bp, Homo sapiens
  source 1..5229: mol_type = unassigned DNA
atggcggtggccgagctgtacacgcagtacaacagggtctggattcccgatcctgaagaagtttggaagtctgctgaaatagccaaggactacagagttggtgacaaggtcctgcgactcctgctggaggatggaacggagctggattattctgtcaatccagaatctctgcctccacttcggaatcctgacatcctcgtgggcgagaatgacctcacggctctcagctatcttcacgagcccgcggtgctccacaacctcagaatccgctttgcagaatccaaactcatttacacctacagtggaatcattttggtggccatgaatccttacaagcagttgccaatatacggagatgccatcatccacgcctacagcgggcagaacatgggcgatatggacccacacatatttgccgtggcagaagaggcatacaagcagatggccagaaacaacagaaaccagtccataattgtaagtggggagtcaggtgctggaaagacagtgtcggctcgctatgccatgaggtactttgccaccgtcagcaaatcgggcagcaacgctcacgtggaagacaaggtcctggcatccaatcccatcaccgaggccgttggaaatgccaagaccacccgcaatgacaatagtagtcggtttgggaaatacacagaaatcagttttgatgaacaaaatcaaattataggagccaacatgagcacttacctcctggagaaatccagagttgtctttcaatcggaaaatgaacgaaattaccacattttctatcagctttgtgcatctgcacagcagtcggaatttaaacatcttaaattggggagtgccgaagaatttaattatacaagaatgggaggcaatactgtcattgagggtgtgaatgatcgagctgaaatggtagagactcaaaagaccttcacgcttctgggtttcaaggaggattttcagatggacgtttttaaaatcctggcagccatcctacatctgggcaatgtgcagatcaccgcggtgggcaacgagaggtcctcagttagtgaggatgacagtcacctgaaggtgttctgtgagctcctgggcctggagagtggcagagttgctcagtggctgtgcaatcgcaaaatcgtcacaagctctgagacggtggtaaaacccatgaccaggcctcaggctgtcaacgccagggatgcactggccaaaaagatctatgctcacctgttcgacttcattgtggagagaattaaccaagcgttgcagttttcaggcaagcagcacacttttattggtgttttggacatttatggttttgaaacctttgatgtgaacagctttgaacaattttgcatcaattacgctaatgaaaaactgcaacaacagtttaacatgcatgtcttcaaactggaacaagaagaatacatgaaggaagatataccttggacgctgatagatttttatgacaatcaaccagttattgacctgattgaagcaaaaatgggaattctggagttactggatgaagaatgtttgttaccacatggaactgatgaaaactggcttcaaaagctgtataataattttgtcaacaggaaccctttgtttgaaaagcctagaatgtcaaacacatcctttgtcatccagcactttgctgataaggtagagtataaatgtgaaggtttcctggagaaaaacagagacaccgtctatgacatgctggttgaaatcctgagagcaagcaagtttcatctctgtgccaacttttttcaagaaaatccaactcctccttctccttttggttcaatgattacagttaaatctgcaaagcaagtcatcaagccaaacagcaagcatttccggaccacagttgggagcaagttccgcagctctctgtacttgctcatggagaccctcaatgcgacgacgccccactacgttcgatgcatcaagccaaatgatgagaagttaccctttgaatttgactccaaaagaattgttcagcagctgcgagcctgcggcgttttagaaacgattcgcattagtgcacagagctacccttccaggtggacatacatcgagttctacagtcgctacggcattctcatgaccaagcaagagctttccttcagcgataaaaaggaggtgtgcaaggtggttttacacagactcatccaggattctaatcagtaccagtttggtaaaaccaaaattttcttcagagcaggacaagtggcttatttagagaaacttcgattggataaactgaggcagagttgtgttatggtacaaaagcacatgcgtggctggctccagaggaaaaaattcctccgagagagacgagccgccctgataatccagcagtacttccggggtcagcaaactgtgaggaaagctattactgcagtggccttaaaagaagcttgggcagccataatcattcagaagcactgccgcgggtatcttgttcgcagcctgtatcagttgattcgcatggccaccatcacaatgcaggcctacagccgaggattcctggcaaggaggaggtatcgaaagatgctggaggaacataaggctgtgatcctacagaaatacgcacgggcgtggctggccagacgcagattccagagtatccgacgattcgtgcttaatattcagcttacttacagggtccagcgtttgcagaaaaagttggaagatcagaacaaagaaaaccatgggctggtggagaagctgactagcctggctgctcttcgagctggggatgtggaaaagattcagaagctggaagcagaactagaaaaagcagccactcacaggcgaaattacgaggagaaggggaagagatacagggatgctgtggaagagaaattggcaaagcttcagaagcataattcagaactggaaacacagaaagaacaaatacagctgaagcttcaagagaagactgaagagttaaaagaaaaaatggacaacctcaccaagcagctctttgatgatgtacaaaaggaagaacggcaaagaatgcttcttgaaaaaagttttgaactgaaaacacaagactatgagaagcagattcagtctttgaaagaagaaattaaagctctcaaggatgagaagatgcaactccaacacctggtggagggggagcacgtcacttctgatggcttgaaggcggaagtggcccgcctgagcaagcaggtcaagacaatctctgagttcgaaaaagagatagaactacttcaggcacagaagatagatgtggagaaacatgtgcagtcacaaaaacgggaaatgagagaaaagatgtcagagatcaccaaacaacttctcgaaagctatgacattgaagatgtaagaagcaggctctctgtggaagatctggaacatttaaatgaggatggagaactttggtttgcttatgaaggactaaagaaagcaacacgtgttttggagagccatttccagtctcagaaggattgctatgaaaaggagattgaagctttgaacttcaaagtggtgcatctcagtcaagaaatcaaccacctgcagaagttattcagagaagaaaatgacatcaatgaaagcatccgtcatgaagttaccaggctaacatcagagaacatgatgatcccagactttaaacagcaaatttcagaattggagaaacagaagcaagatcttgaaatccgcctgaatgaacaagctgagaaaatgaaaggaaaactagaagaattgtctaatcagttacatcgcagtcaagaggaggaaggaacacaaagaaaggccttggaagcccaaaatgaaatacataccaaagagaaggagaagctgattgataagattcaagaaatgcaggaggccagtgaccacttgaagaaacaatttgaaactgaaagtgaagtcaagtgtaacttccggcaggaagcatcccggctcactttggaaaacagggatcttgaagaagaattagacatgaaagacagagtgattaaaaagctacaagatcaagtcaagacactaagcaagacaattggaaaagccaatgatgtgcactcgtcctcaggacccaaggagtaccttggaatgctgcaatacaagagagaagacgaggccaagctcattcagaacctcattcttgacttgaagccccgtggcgtggtggtgaacatgatccccgggctgccggctcatatcctgttcatgtgtgtgcgctacgcagactctctgaatgatgccaacatgctgaagtccctcatgaacagcaccattaatggcatcaagcaggtggttaaggaacatttagaagactttgaaatgctgtccttttggctttccaacacttgtcattttctcaattgcctgaagcagtacagcggagaagaggaattcatgaagcataatagtccacagcagaataagaattgcttgaacaattttgacctttcagaatacagacagattctcagtgatgtggctatacgaatatatcatcaatttattatcataatggaaaagaatatccaaccgataatagttccgggaatgctggagtatgagagcctgcagggcatttccggcctgaagcccacaggcttccggaagcgctcctctagcatagacgacacggacggctacaccatgacctccgtcctgcaacagctgagctacttttacaccaccatgtgccagaacggcctggaccccgagcttgtgaggcaggcggtgaagcagctcttcttcttgatcggggcggtcacgctgaacagcctcttcctgcgcaaggacatgtgctcctgcagaaaagggatgcagatcaggtgcaatatcagctacttagaagaatggcttaaagataagaacttgcagaacagcttagcaaaggaaactttggagcccctctctcaggcagcctggttgcttcaggtcaagaagaccacagacagtgatgccaaggagatctacgaacgctgcacctcactgtctgctgtgcagatcataaagatccttaattcatacacacctatagatgactttgagaagagagtgactccatcctttgttcgcaaagtacaggctctcctaaatagccgggaggattcatcacagctgatgttggataccaaatatctctttcaagtcacatttccttttaccccctctccacatgctctggaaatgattcagatccccagcagtttcaagctaggctttctgaataggttatag

SEQ ID NO: 138 - DNA, 1497 bp, Homo sapiens
  source 1..1497: mol_type = unassigned DNA
atgtattctccgctctgtctcacccaggatgaatttcatcctttcatcgaagcacttctgccccacgtccgagcctttgcctacacatggttcaacctgcaggcccgaaaacgaaaatacttcaaaaaacatgaaaagcgtatgtcaaaagaagaagagagagccgtgaaggatgaattgctaagtgaaaaaccagaggtcaagcagaagtgggcatctcgacttctggcaaagttgcggaaagatatccgacccgaatatcgagaggattttgttcttacagttacagggaaaaaacctccatgttgtgttctttccaacccagaccagaaaggcaagatgcgaagaattgactgcctccgccaggcagataaagtctggaggttggaccttgttatggtgattttgtttaaaggtattccgctggaaagtactgatggcgagcgccttgtaaagtccccacaatgctctaatccagggctctgtgtccaaccccatcacataggggtttctgttaaggaactcgatttatatttggcatactttgtgcatgcagcagattcaagtcaatctgaaagtcccagccagccaagtgacgctgacattaaggaccagccagaaaatggacatttgggcttccaggacagttttgtcacatcaggtgtttttagtgtcactgagctagtaagagtgtcacagacaccaatagctgcaggaactggcccaaatttttctctctcagatttggaaagttcttcatactacagcatgagtccaggagcaatgaggaggtctttacccagcacatcctctacgagctccacaaagcgcctcaagtctgtggaggatgaaatggacagtcctggtgaggagccattttatacaggccaagggcgctccccaggaagtggcagtcagtcaagtggatggcatgaagtggagccaggaatgccatctccaaccacactgaagaagtcggagaagtctggtttcagcagcccctccccttcacagacctcctccctgggaacggcgttcacacagcatcaccgacctgtcattacaggacccagagcaagtccgcatgcaacaccatcgactcttcatttcccgacatcacccattatccagcagcctgggccttacttctcacacccagccatccgctatcaccctcaggagacgctgaaagaatttgtccaacttgtctgccctgatgctggtcagcaggctggacaggtggggttcctcaatcccaatgggagcagccaaggcaaggtgcacaacccattccttcccaccccaatgttgccaccgccaccgccaccaccgatggccaggcctgtgcctctgccggtgccagacacaaagcctccaaccacgtcaacagaaggaggtgcagcctcccccacgtcaccaatcctggtacctgggataaaagttgcagcgtcccaccatccaccagacagaccacctgaccccttctcaactctgtaa

SEQ ID NO: 139 - DNA, 429 bp, Homo sapiens
  source 1..429: mol_type = unassigned DNA
atggaatcagcaagagaaaacatcgaccttcaacctggaagctccgaccccaggagccagcccatcaacctgaaccattacgccaccaagaagagcgtggcggagagcatgctggacgtggccctgttcatgtccaacgccatgcggctgaaggcggtgctggagcagggaccatcctctcactactacaccaccctggtcaccctcatcagcctctctctgctcctgcaggtggtcatcggtgtcctgctcgtggtcattgcacggctgaacctgaatgaggtagaaaagcagtggcgactcaaccagctcaacaacgcagccaccatcttggtcttcttcactgtggtcatcaatgttttcattacagccttcggggcacataaaacagggttcctggctgccagggcctcaaggaatcctctctga

SEQ ID NO: 140 - DNA, 1257 bp, Homo sapiens
  source 1..1257: mol_type = unassigned DNA
atggacagcagcgctgcccccacgaacgccagcaattgcactgatgccttggcgtactcaagttgctccccagcacccagccccggttcctgggtcaacttgtcccacttagatggcaacctgtccgacccatgcggtccgaaccgcaccgacctgggcgggagagacagcctgtgccctccgaccggcagtccctccatgatcacggccatcacgatcatggccctctactccatcgtgtgcgtggtggggctcttcggaaacttcctggtcatgtatgtgattgtcagatacaccaagatgaagactgccaccaacatctacattttcaaccttgctctggcagatgccttagccaccagtaccctgcccttccagagtgtgaattacctaatgggaacatggccatttggaaccatcctttgcaagatagtgatctccatagattactataacatgttcaccagcatattcaccctctgcaccatgagtgttgatcgatacattgcagtctgccaccctgtcaaggccttagatttccgtactccccgaaatgccaaaattatcaatgtctgcaactggatcctctcttcagccattggtcttcctgtaatgttcatggctacaacaaaatacaggcaaggttccatagattgtacactaacattctctcatccaacctggtactgggaaaacctgctgaagatctgtgttttcatcttcgccttcattatgccagtgctcatcattaccgtgtgctatggactgatgatcttgcgcctcaagagtgtccgcatgctctctggctccaaagaaaaggacaggaatcttcgaaggatcaccaggatggtgctggtggtggtggctgtgttcatcgtctgctggactcccattcacatttacgtcatcattaaagccttggttacaatcccagaaactacgttccagactgtttcttggcacttctgcattgctctaggttacacaaacagctgcctcaacccagtcctttatgcatttctggatgaaaacttcaaacgatgcttcagagagttctgtatcccaacctcttccaacattgagcaacaaaactccactcgaattcgtcagaacactagagaccacccctccacggccaatacagtggatagaactaatcatcagccacccttggcagtcagcatggcccagatctttacacgatatcctcctccgactcatcgtgagaaaacctgcaatgattacatgaagaggtag

SEQ ID NO: 141 - DNA, 1065 bp, Homo sapiens
  source 1..1065: mol_type = unassigned DNA
atgatgtcttacctcaaacaacccccatacggcatgaacgggctgggcctggccgggcccgccatggacctcctgcacccatccgtgggctatccggccactccgcggaagcagcggcgggagcgcaccaccttcacgcgttcacagctggacgtgctcgaggcgctcttcgccaagactcgctaccctgacatcttcatgcgggaggaggtggcgctcaagatcaacctgccggagtctagagtccaggtctggttcaagaaccgccgcgccaaatgccgccagcagcagcagagcgggagcggaaccaagagccgcccagccaagaagaagtcctctccagtgcgggagagctcgggctccgaaagcagtggccaattcacgccgccagctgtgtccagctctgcctcgtcctctagctcggcgtccagctcttccgccaacccagcggctgcagcggctgcgggactaggtgggaacccggtggcggccgcgtcgtcgctgagtacaccagctgcctcatctatctggagcccggcctccatctcgccaggctcagcgcccgcgtccgtgtcggtgccggagccattggccgcgcctagcaacacctcgtgtatgcagcgctccgtagctgcaggcgccgccaccgcagcagcctcttatcccatgtcctacggccagggcggcagctacggccaaggctaccctacgccctcctcttcctactttggcggcgtggactgcagctcatacctagcgcccatgcactcacatcaccacccgcaccagctcagccccatggcaccctcctccatggcgggccaccatcatcaccacccacatgcgcaccacccgttgagccagtcctcaggccaccaccaccaccatcaccaccaccaccaccaaggctacggtggctctgggcttgccttcaactctgccgactgcttggattacaaggagcctggcgccgctgctgcttcctccgcctggaaactcaacttcaactcccccgactgtctggactataaggaccaagcctcatggcggttccaggtcttgtga

SEQ ID NO: 142 - DNA, 822 bp, Homo sapiens
  source 1..822: mol_type = unassigned DNA
atggcgttcctggccgggccgcgcctgctggactgggccagctcgccgccgcacctgcagttcaataagttcgtgctgaccgggtaccggcccgccagcagcggctcgggctgcctgcgcagcctcttctacctgcacaacgaactgggcaacatctacacgcacgggctggccctgctgggcttcctggtgctggtgccaatgaccatgccctggggtcagctgggcaaggatggctggctgggaggcacacattgcgtggcctgccttgcaccccctgcaggctccgtgctctatcacctctttatgtgccaccaagggggcagcgctgtgtacgcccggctcctcgccctggacatgtgtggggtctgccttgtcaacacccttggggccctgcccatcatccactgcaccctggcctgcaggccctggctgcgcccggctgccctggtgggctacactgtgttgtcgggtgtggccggctggcgtgctctcaccgccccctccaccagtgctcggctccgggcatttggatggcaggctgctgcccgcctactggtatttggggcccggggagtgggtctgggttcaggggctccaggctccctgccctgctacctgcgcatggacgcactggcgctgcttgggggactggtaaatgtagcccgtctgcccgagcgctggggacctggccgctttgactactggggcaactcccaccagatcatgcacctgctgagcgtgggctccatcctgcagctgcacgccggcgtcgtgcccgacctgctctgggctgcccaccacgcctgtccccgggactga

SEQ ID NO: 143 - DNA, 639 bp, Homo sapiens
  source 1..639: mol_type = unassigned DNA
atgaggatgacaatggaagagatgaagaatgaagctgagaccacatccatggtttctatgcccctctatgcagtcatgtatcctgtgtttaatgagctagaacgagtaaatctgtctgcagcccagacactgagagccgctttcatcaaggctgaaaaagaaaatccaggtctcacacaagacatcattatgaaaattttagagaaaaaaagcgtggaagttaacttcacggagtcccttcttcgtatggcagctgatgatgtagaagagtatatgattgaacgaccagagccagaattccaagacctaaacgaaaaggcacgagcacttaaacaaattctcagtaagatcccagatgagatcaatgacagagtgaggtttctgcagacaatcaaggatatagctagtgcaataaaagaacttcttgatacagtgaataatgtcttcaagaaatatcaataccagaaccgcagggcacttgaacaccaaaagaaagaatttgtaaagtactccaaaagtttcagtgatactctgaaaacgtattttaaagatggcaaggcaataaatgtgttcgtaagtgccaaccgactaattcatcaaaccaacttaatacttcagaccttcaaaactgtggcctga

SEQ ID NO: 144 - DNA, 3426 bp, Homo sapiens
  source 1..3426: mol_type = unassigned DNA
atggcagtgcccggcgacgctgcacgagtcagggacaagcccgtccacagtggggtgagtcaagcccccacggcgggccgggactgccaccatcgtgcggaccccgcatcgccgcgggactcgggctgccgtggctgctggggagacctggtgctgcagccgctccggagctctcggaaactttcctccgcgctgtgcgcgggctccctgtcctttctgctggcgctgctggtgaggctggtccgcggggaggtcggctgtgacctggagcagtgtaaggaggcggcggcggcggaggaggaggaagcagccccgggagcagaagggggcgtcttcccggggcctcggggaggtgctcccgggggcggtgcgcggctcagcccctggctgcagccctcggcgctgctcttcagtctcctgtgtgccttcttctggatgggcttgtacctcctgcgcgccggggtgcgcctgcctctggctgtcgcgctgctggccgcctgctgcgggggggaagcgctcgtccagattgggctgggcgtcggggaggatcacttactctcactccccgccgcgggggtggtgctcagctgcttggccgccgcgacatggctggtgctgaggctgaggctgggcgtcctcatgatcgccttgactagcgcggtcaggaccgtgtccctcatttccttagagaggttcaaggtcgcctggagaccttacctggcgtacctggccggcgtgctggggatcctcttggccaggtacgtggaacaaatcttgccgcagtccgcggaggcggctccaagggagcatttggggtcccagctgattgctgggaccaaggaagatatcccggtgtttaagaggaggaggcggtccagctccgtcgtgtccgccgagatgtccggctgcagcagcaagtcccatcggaggacctccctgccctgtataccgagggaacagctcatggggcattcagaatgggaccacaaacgagggccaagaggatcacagtcttcaggaaccagtattactgtggacatcgccgtcatgggcgaggcccacggcctcattaccgacctcctggcagacccttctcttccaccaaacgtgtgcacatccttgagagccgtgagcaacttgctcagcacacagctcaccttccaggccattcacaagcccagagtgaatcccgtcacttcgctcagtgaaaactatacctgttctgactctgaagagagctctgaaaaagacaagcttgctattccaaagcgcctgagaaggagtttgcctcctggcttgttgagacgagtttcttccacttggaccaccaccacctcggccacaggtctacccaccttggagcctgcaccagtacggagagaccgcagcaccagcatcaaactgcaggaagcaccttcatccagtcctgattcttggaataatccagtgatgatgaccctcaccaaaagcagatcctttacttcatcctatgctatttctgcagctaaccatgtaaaggctaaaaagcaaagtcgaccaggtgccctcgctaaaatttcacctctttcatcgccctgctcctcacctctccaagggactcctgccagcagcctggtcagcaaaatttctgcagtgcagtttccagaatctgctgacacaactgccaaacaaagcctaggttctcacagggccttaacttacactcagagtgccccagacctatcccctcaaatcctgactccacctgttatatgtagcagctgtggcagaccatattcccaagggaatcctgctgatgagcccctggagagaagtggggtagccactcggacaccaagtagaacagatgacactgctcaagttacctctgattatgaaaccaataacaacagtgacagcagtgacattgtacagaatgaagatgaaacagagtgcctgagagagcctctgaggaaagcatcggcttgcagcacctatgctcctgagaccatgatgtttctggacaaaccaattcttgctcccgaacctcttgtcatggataacctggactcaattatggagcagctaaatacttggaattttccaatttttgatttagtggaaaatataggaagaaaatgtggccgtattcttagtcaggtatcttacagactttttgaagacatgggcctctttgaagcttttaaaattccaattagggaatttatgaattattttcatgctttggagattggatatagggatattccttatcataacagaatccatgccactgatgttttacatgctgtttggtatcttactacacagcctattccaggcctctcaactgtgattaatgatcatggttcaaccagtgattcagattctgacagtggatttacacatggacatatgggatatgtattctcaaaaacgtataatgtgacagatgataaatacggatgtctgtctgggaatatccctgccttggagttgatggcgctgtatgtggctgcagccatgcacgattatgatcatccaggaaggactaatgctttcctggttgcaactagtgctcctcaggcggtgctatataacgatcgttcagttttggagaatcatcacgcagctgctgcatggaatcttttcatgtcccggccagagtataacttcttaattaaccttgaccatgtggaatttaagcatttccgtttccttgtcattgaagcaattttggccactgacctgaagaaacactttgacttcgtagccaaatttaatggcaaggtaaatgatgatgttggaatagattggaccaatgaaaatgatcgtctactggtttgtcaaatgtgtataaagttggctgatatcaatggtccagctaaatgtaaagaactccatcttcagtggacagatggtattgtcaatgaattttatgaacagggtgatgaagaggccagccttggattacccataagccccttcatggatcgttctgctcctcagctggccaaccttcaggaatccttcatctctcacattgtggggcctctgtgcaactcctatgattcagcaggactaatgcctggaaaatgggtggaagacagcgatgagtcaggagatactgatgacccagaagaagaggaggaagaagcaccagcaccaaatgaagaggaaacctgtgaaaataatgaatctccaaaaaagaagactttcaaaaggagaaaaatctactgccaaataactcagcacctcttacagaaccacaagatgtggaagaaagtcattgaagaggagcaacggttggcaggcatagaaaatcaatccctggaccagacccctcagtcgcactcttcagaacagatccaggctatcaaggaagaagaagaagagaaagggaaaccaagaggcgaggagataccaacccaaaagccagaccagtga

SEQ ID NO: 145 - DNA, 1257 bp, Homo sapiens
  source 1..1257: mol_type = unassigned DNA
atgttttctcctgatcaagaaaatcatccatctaaagcaccagtaaaatatggtgaactcattgtcttagggtataatgggtctctcccaaatggcgatagaggaaggaggaaaagtaggtttgctttgtttaaaagacctaaggcaaatggggtgaagcccagcactgtgcatattgcttgtactcctcaggctgcaaaggcaataagcaacaaagaccagcatagcatatcatatactttatctcgggcccagactgtggtggttgaatatactcatgacagcaacaccgatatgtttcagattggccggtcgactgaaagccccattgattttgtagtaactgacacggttcctggaagtcaaagtaattctgatacacagtcagtacaaagcactatatcaagatttgcctgcagaatcatatgtgaacggaatcctccctttacagcacggatttatgctgcaggatttgactcatcaaaaaacatctttcttggggagaaggctgccaaatggaagacatcagatggacagatggatggcttgaccactaatggtgttcttgtgatgcatccacgcaatgggttcacagaagactccaagcctggaatatggagagaaatatcggtgtgtggaaatgtatttagcctacgtgaaaccagatcggctcagcagagaggaaaaatggtggaaattgaaaccaatcagttacaagatggctcgttaattgacctctgtggtgcaacattgttatggcgtactgcagaaggcctttcccacactcctaccgtgaagcatttagaagctttaagacaggaaatcaatgcagcacgacctcagtgccctgtagggttcaacacactagcatttcctagtatgaagaggaaagacgttgtagatgaaaaacaaccatgggtatatctaaactgcggccatgtacatggctatcataactggggaaacaaagaagaacgtgatggaaaagatcgtgaatgtcctatgtgtaggtctgttggtccctatgttcctctgtggcttggatgtgaagctggattttatgtggacgccggccctccaacccatgcgtttagcccgtgtgggcatgtgtgttcagaaaagacaactgcctattggtcccagatcccacttcctcatggtactcatacttttcatgcagcctgtcccttttgtgcacatcagttggctggtgaacaaggctacatcagacttatttttcaaggacctctagactaa

SEQ ID NO: 146 - DNA, 13725 bp, Homo sapiens
  source 1..13725: mol_type = unassigned DNA
atgtcgggtgaggacgctgaggtccgggcagtctctgaagatgtctccaatggaagcagtggctcgcccagccctggggacacactgccctggaaccttgggaaaacgcagcggagccggcgcagcgggggtggcgctgggagcaacgggagtgtcctggacccagctgagcgggcggtcattcgcatcgcagatgagcgggatcgtgtgcagaagaaaaccttcaccaagtgggtcaacaagcacctcatcaaggcccagaggcacatcagtgacctgtatgaagacctccgcgatggccacaacctcatctccctgctggaggtcctctcgggggacagcctgccccgggagaaggggaggatgcgtttccacaagctgcagaatgtccagattgccctggactacctccggcaccgccaggtgaagctggtgaacatcaggaatgatgacatcgctgacggcaaccccaagctgacccttggcctcatctggacaatcattctgcacttccagatctcagatatccaggtgagtgggcagtcggaggacatgacggccaaggagaagctgctgctgtggtcgcagcgaatggtggaggggtaccagggcctgcgatgcgacaacttcacctccagctggagagacggccgcctcttcaatgccatcatccaccggcacaagcccctgctcatcgacatgaacaaggtgtaccggcagaccaacctggagaacctggaccaggccttctctgtggcggagcgggacctgggagtgacgcggctcctggaccctgaggacgtggatgtccctcagcccgacgagaagtccatcatcacctacgtctcgtcgctgtatgacgccatgccccgcgtgccggacgtgcaggatggggtgagggccaacgagctgcagctgcgctggcaggagtaccgggagctggtgctgctgctgcttcagtggatgcgacaccacacggccgcctttgaggaacgcaggttcccctccagcttcgaggagattgagatcctgtggtctcagttcctgaagtttaaggagatggagctaccagccaaggaggccgacaagaacaggtccaagggcatctaccaatccctggagggagcggtgcaagcaggccagctcaaggtgccccctggctaccacccgctggatgtggagaaggagtggggcaagctgcacgtggccatcctggagcgggagaagcagctccgcagcgagtttgagaggctggagtgtcttcagcgcatcgtgaccaagctgcagatggaggcggggctgtgtgaggagcagctgaaccaggccgacgccctgctgcagtcggatgtccggctgctggctgcaggcaaagtgccacagcgggcgggggaggtggaacgggacttggacaaggcggatagcatgatccggctgctcttcaacgacgtgcagaccctcaaggatggacggcacccgcagggcgagcagatgtaccgcagggtgtaccgtctgcacgagcgcctggtagccatccgcaccgagtacaacctacggctgaaggcaggcgtggcggcccctgcaacccaggtggcccaggtgactctgcagagtgtgcagaggcgccccgagctggaggactccactctgcgctacctgcaggacctgctggcctgggtggaggagaaccagcaccgtgtggatggcgctgagtggggtgtggacctgcccagcgtggaggcgcagctgggcagccaccgaggcctgcaccagtccatcgaagaattccgggccaagatcgagcgggcacggagtgacgagggccagctctcccccgccacccggggtgcctaccgtgactgcctgggtcggctggacctgcagtacgccaagctgctgaactcctccaaggcccgcctcaggtccctggagagcttgcacagctttgtggcagccgccactaaggagctaatgtggctgaatgagaaggaggaggaggaggtgggcttcgactggagcgaccgcaacaccaacatgaccgccaagaaggagagctactcggcgctgatgcgggagctggagctgaaggagaagaagatcaaggagctccaaaatgctggggaccggctgctgcgggaggaccacccggcccggcccacggtggagtccttccaggcggccctgcagacgcagtggagctggatgctacagctgtgctgctgtatcgaggcacacctgaaggagaacgctgcctactttcagttcttctcagatgtgcgggaggccgaggggcagttgcagaagctgcaggaggcactgcgtaggaaatacagttgtgatcgctccgccaccgtcacccggctggaggacctgctgcaggatgcccaggacgagaaggaacagctgaacgagtacaagggccacctctcaggcctggccaagcgggccaaggccgtcgtgcagctgaagccccgccacccagcccaccccatgcggggccgcctgcccctgctggccgtgtgcgactataagcaggtggaggtgactgtgcacaagggtgacgagtgccagctggtgggccctgcacagccgtcccactggaaggtgctcagcagctccggcagcgaggccgccgtgccctccgtgtgcttcctggtgcccccgcccaaccaggaggcccaggaggccgtcaccaggctggaggcccagcaccaggccctggtcacgctgtggcaccagttgcacgtggacatgaagagccttctggcctggcagagccttcgccgcgacgtgcagctcatccgctcctggtccctggccacgttccgcaccctgaagccagaggagcagcgccaagccctgcacagcctggagctgcactaccaggccttcctgcgggacagccaggacgcgggcggcttcggacccgaggaccggctgatggctgagcgcgagtacggctcctgcagccaccactaccagcagctgctgcagagcctggaacagggtgcacaggaagagtctcgctgccagcgctgcatctccgagctcaaagacatccggctgcagctggaggcctgtgagacgcgcaccgtgcaccgcctgcggctgccgctggacaaagagccggcacgggagtgtgcccagcgcatcgccgagcagcagaaggcacaggcagaggtggaggggctgggcaagggggtcgcccggctctctgccgaggccgagaaggtcttggccctaccagagccatcgcctgcggcccccacgctgcgctcggagctggagctgacgctgggcaagctggagcaggtccgcagcctgtctgccatctacctggagaagctcaagaccatcagcctggtgatccgcggcacgcagggggccgaggaggtgctcagggcccacgaggagcagctcaaggaggcccaggccgtgccggccaccctcccggagctcgaggccaccaaggcctctctgaagaagctgcgggcccaggccgaggcacagcagcccacgttcgacgccctgcgggatgagctgcggggggcacaggaggtgggggagcgactgcagcagcggcacggggagcgggacgtggaggtggagcgctggcgggagcgggtcgcccagttgcttgagcgctggcaggctgtgctggcccagaccgacgtgcggcagcgcgagctcgagcaactgggccgccagctgcgttactaccgcgagagtgcagaccccttgggcgcctggctgcaggacgccaggcggcggcaggagcagatccaggccatgccgctggccgacagccaggctgtgcgggagcagctgcggcaggagcaggccctgctggaggagatcgagcgccacggcgagaaggtcgaggagtgccagaggtttgcgaaacagtacatcaacgccatcaaggactatgaactccagctggtgacgtacaaggcgcagcttgagccggtggcctccccggccaagaagcccaaggtccagtcgggatcagagagtgtcatccaggagtacgtggacctgcgtacgcactacagcgagctgaccacactgacgagccagtacatcaagttcatcagcgagactctgcggcgcatggaggaggaggagaggctggctgagcagcagcgggcagaggagcgcgagcggctggccgaggtggaggccgcgctggagaagcagcggcagctggccgaggcgcacgcccaggcaaaggcacaggcggagcgggaggcgaaggagctgcagcagcgcatgcaggaggaggtggtgcggcgggaggaggcggcggtggacgcgcagcagcagaagcgcagcattcaggaggagctgcagcagctgcggcagagctcggaggcggagatccaggccaaggcccggcaggcagaggcggctgagcgcagccggctgcgcatcgaggaggagatccgcgtggtgcgcctgcagttggaggccaccgagcgccagcgtggcggggctgagggggagctgcaggcactgcgtgcacgggcggaggaggctgaggcacaaaagcgacaggcgcaggaggaggccgagcgcttgcggaggcaggtgcaggacgagagccagcgtaagcggcaggcggaggtggagctggcctcgcgcgtgaaggccgaggccgaggcggcgcgcgagaagcagcgggccctgcaggccctggaggagctgcggctgcaggcggaggaggcggagcggcgcctgcggcaggccgaggtggagcgagcgcggcaggtacaggtggccctggagacggcgcagcgcagtgcagaggcggagctgcagagcaaacgcgcctccttcgccgagaagacggcacagctggagcgctccctgcaggaggaacacgtggctgtggcacagctgcgggaggaggctgagcggcgggcacagcagcaggccgaggccgagcgggcgcgcgaggaggcagagcgggagctggagcgctggcagctcaaggccaacgaggcgctacggctgcggctgcaggcggaggaggtggcgcagcagaagagcctggcgcaggccgaggctgagaagcagaaggaggaggcggagcgcgaggcgcggcggcgcggcaaggcggaggagcaggccgtccggcagcgggagctggctgaacaagagctggagaagcagcggcagctggcggaaggcaccgcgcagcagcgcctggccgcggagcaggagttgatccggctgcgggccgagacggagcagggggagcagcagcggcagctgctggaggaggagctggcccggctgcagcgtgaggcggctgcagccacgcagaaacggcaggagctggaagccgagctggccaaggtgcgggccgagatggaggtgctgctggccagcaaggcgagggctgaggaggagtcgcgctccaccagcgagaagtccaagcagaggctggaggccgaggccggccggttccgcgagctggccgaggaggccgcccgcctgcgtgccctggcggaagaggccaagcggcagcggcagctggccgaggaagacgcggcgcggcagcgggccgaggcggagcgggtgcttgcggagaagctggccgccatcggcgaggccacgcggctcaagacggaggcggagatcgcgctcaaggagaaggaggcggagaacgagcgcctgcggcggctggcggaggacgaggccttccagcggcggcggctggaggagcaggccgcgcaacacaaggctgacatcgaggagcgcctggcccagctgcgcaaggcatcggacagcgagctggagcggcagaaggggctggtggaggacacgctgaggcagcggcggcaggtggaggaggagatcctggcgctgaaggcgagcttcgagaaggcggccgctggcaaggcggagctggagctggagctgggacgcatccgcagcaacgcggaggacacgctgcgcagcaaggagcaggccgagctggaggctgcgaggcagcggcagctggcggcggaggaggagcggcggcgccgtgaggctgaggagcgcgtgcagaagagcctggcggccgaggaggaggccgcacggcagcggaaggcggcgctggaggaagtcgagcggctgaaagccaaggtggaggaggcgcggcgcctgcgggagcgagcggagcaggagtcggcgcggcagctgcagctggcccaggaggccgcccagaagcggctgcaggcggaagagaaggcacacgccttcgcggtgcagcagaaggagcaggagctacagcagacgctgcagcaggagcagagcgtgctggaccagctgcgcggcgaggcggaggcggcccggcgggcggctgaggaggcggaggaggcccgggtgcaggcggagcgtgaggcggcgcagtcccggcggcaggtggaagaggccgagcggctgaagcagtcggcagaggagcaggcacaggcccgggctcaggcacaggcggctgcagagaagctgcgcaaggaggccgagcaagaggcggcgcggcgggcacaggcggagcaggcggccctgcggcagaagcaggcagctgacgcggagatggagaagcataagaaattcgccgagcagacgctgcggcagaaggcgcaggtggagcaggagctgacaacactgcggctgcagctggaggagaccgaccaccagaagaacctgctggacgaggagctgcagcggctgaaggcggaggccacggaggccgcacgccagcgcagccaggtggaggaggagctcttctcggtgcgcgtgcagatggaggagctgagcaagctcaaggcacgcatcgaggctgagaaccgcgcactcatcttgcgtgacaaggacaatacgcagcgcttcctgcaggaggaggctgagaagatgaagcaggtggcggaggaggccgcgcggctgagtgtggcggcccaagaggctgcgcgactgcggcagctggcagaggaggacctggcacagcagcgggccttggcagagaagatgctcaaggagaagatgcaggcggtgcaggaggccacgcgactcaaggctgaggcggaactgctgcagcagcagaaggagcttgcgcaggagcaggcgcggcggctgcaggaggacaaggagcagatggcgcagcagctggcggaggagacgcagggcttccagcggacgctggaggccgagcggcagcggcagctggagatgagcgctgaggctgagcgcctcaagctgcgtgtggccgagatgagccgagcccaggcccgcgctgaggaggacgcccagcgcttccggaagcaggcggaggagatcggtgagaagctgcaccgcacggagctcgccacccaggagaaggtgaccctggtgcagacactggagatccagcgacagcagagtgaccatgatgccgagcgcctgcgggaggccatcgctgagctggagcgtgagaaggagaagctccaacaggaggccaaactgctgcagctcaagtctgaggagatgcagacggtgcagcaggagcagctgctgcaggagacgcaggccctgcagcaaagcttcctctctgaaaaggacagcctgctacagcgggagcgcttcatcgagcaggagaaggccaagctggagcagctcttccaggacgaggtggccaaggcacagcagctgcgtgaggagcagcagcggcagcagcagcagatggagcaggaacggcagcggctggtggccagcatggaggaggcgcggcggcggcagcatgaggccgaggagggcgtgcggcgcaagcaggaggagctgcagcagctggagcagcagcggcggcagcaggaggagctgctggctgaggagaaccagaggctgcgtgagcagctgcagctcctggaggagcagcaccgggccgcgctggcgcactcagaggaggtcactgcctcgcaggtggctgccacaaagaccctgcccaatggccgggatgcacttgatggccccgcggcagaggcagagccggagcacagcttcgatggcctgcggcggaaggtgtcagctcagaggctgcaggaggccggcatcctgagtgcggaggagctgcagcggttggcgcagggccacaccacggtggacgagctcgcacggcgggaagacgtgcgccactacctgcagggccgcagcagtatcgcagggctgttgctgaaggccaccaatgagaagctgagtgtttacgccgccctgcagaggcagctgctgagtcccggcacggccctcatcctgctggaggcgcaggcggcctcaggcttcctgctggaccctgtgcggaaccggcggctgaccgtcaacgaggctgtgaaggagggtgtggtgggccccgagctgcaccacaagctgctgtcggccgagcgcgccgtcactggctacaaggacccctacactggccagcagatctctctcttccaagccatgcagaagggcctcatcgtccgggagcacggcatccgcctgctggaggcccagatcgccacgggcggcgttatcgaccccgtgcacagccaccgcgtgcccgtggacgtggcctaccggcgcggctacttcgacgaggagatgaaccgcgtcctggcggaccccagcgacgacaccaagggcttctttgaccccaacacgcacgagaacctcacgtacctgcagctactggagcgctgcgtggaggaccccgagacgggcctgtgccttctgccactcacggataaggctgccaagggcggggagctggtctacactgactccgaggcccgggacgtctttgagaaggccaccgtgtctgcgccgttcggcaagttccagggcaagacggtgaccatttgggagatcatcaactcggaatacttcacggcagagcagcggcgggacctgctgcggcagttccgcacgggccggatcacagtggagaagatcatcaagatcatcatcacggtggtggaggagcaggagcagaagggccggctttgctttgagggcctgcgcagcctggtgccagccgccgagctgctggagagcagggtcatcgaccgcgagctctaccagcagctgcagcgaggtgagcgctctgtgcgagacgtagccgaggtggacactgtgcggcgggctctccggggtgccaacgtcatcgcgggtgtatggctggaggaggcggggcagaagctgagtatctacaatgccctgaagaaagacctgctgccatccgacatggccgtggccctgttggaagcccaggccggcaccgggcacatcatcgaccccgccaccagcgcccggctgaccgtggacgaggcagtgcgtgctggcctggtgggccccgagtttcatgagaagctgctatcagccgagaaggctgtgacagggtacagggacccctacacagggcagagcgtctccctgttccaggccctgaagaagggcctcattccccgggagcagggcctgcgcctgttggacgcccagctgtccacgggcggcatcgtggaccccagcaagagccaccgcgtgcccctggatgtcgcctgcgcccgaggctgcctggatgaggagaccagcagggccctgtcggcaccaagggccgacgccaaggcctacagtgaccccagcacaggggagccggccacctacggcgagctccagcagcggtgccggcccgaccagctgaccgggctgagcctgctgccgctctcagaaaaggctgctcgggcccggcaggaggagctctactcagagctgcaggcccgtgagacctttgaaaagaccccggttgaggtccccgtgggtggcttcaagggcaggacggtgacggtgtgggagctcatcagctctgagtacttcactgcggagcagcggcaggagctgttgcgtcagttccgcacgggcaaggtcaccgtggagaaggtcatcaagattctcattaccatcgtggaggaggtggagaccctgcggcaggagaggctgtccttcagcggcctccgtgcccctgtgccagccagcgagctcctggcttccggggtcctcagcagagcccagtttgagcagctcaaggacggcaagacgacggtcaaggacctttcggagctgggctccgtgcggacgctgctgcagggcagtggctgcctcgccggcatctacctggaggacaccaaggagaaggtgtccatctacgaggccatgcgccggggcctgctgagagccacaacggctgcgctcctgctggaggcgcaggcggccactggcttcctggtggaccccgtgcggaaccagcgcctgtatgtccacgaggccgtgaaggcgggcgtggtgggccccgagcttcacgagcagctgctgtctgccgagaaggccgtcaccggctacagagacccctactcgggcagcaccatctccctcttccaggccatgcagaagggcctggttctccggcagcacggcatccgcctgctggaggcccagatcgccacgggcggcatcatcgaccccgtgcacagccaccgcgtgcctgtggacgtggcctaccagcgcggctacttcagtgaggagatgaaccgcgtcctggcggaccccagcgacgacaccaagggcttctttgaccccaacacgcatgagaacctcacgtacaggcagctgctggagcggtgcgtggaggaccccgagacgggcttgcgccttctgccactgaaaggggcggagaaggctgaggtggtggagaccacgcaggtgtacactgaggaggagacaagaagggcatttgaagagacacagatcgacattcccggcggcggcagccacggcggctccaccatgtccctgtgggaggtgatgcagtcggacctgatccccgaggagcagcgggcccagctgatggctgacttccaggccggccgggtgaccaaggaacgcatgatcatcatcatcatcgagatcattgagaagacagagatcatccgccagcagggtctggcctcctacgactacgtgcgccgccgcctcacggctgaggacctgttcgaggctcggatcatctctctcgagacctacaacctgctccgggagggcaccaggagcctccgtgaggctctcgaggcggagtccgcctggtgctacctctatggcacgggctccgtggctggtgtctacctgcccggttccaggcagacactgagcatctaccaggctctcaagaaagggctgctgagtgccgaggtggcccgcctgctgctggaggcacaggcagccacaggcttcctgctggacccggtgaagggggagcggctgactgtggatgaggctgtgcggaagggcctcgtggggcccgagctgcacgaccgcctgctctcggctgagcgggcggtcaccggctaccgtgacccctacaccgagcagaccatctcgctcttccaggccatgaagaaggagctgatccctactgaggaggccctgcggctgctggatgcccagctggccaccggcggcatcgtggacccccgcctgggcttccaccttcccctggaggtggcttaccagcgtggctacctcaacaaggacacgcacgaccagctgtcagagcccagcgaggtgcgcagctacgtggacccgtccaccgacgagcgcctcagctacacgcagctgctcaggcggtgccgtcgtgacgacggcaccggccagctgctcctgccactgtcggacgcccgcaagctgaccttccgtggcctgcggaagcagatcaccatggaggagctggtgcgctcgcaggtcatggacgaggccacggcgctgcagctgcgggagggcctgacctccatcgaggaggtcaccaagaacttgcagaagttcctggaaggcaccagctgcatcgctggtgtcttcgtggacgccaccaaggaacggctctcggtgtaccaggccatgaagaagggcatcatccgccccggcacagcctttgagctcctggaggcgcaggcggccaccggttacgtcatcgaccccatcaagggactgaagctgacggtggaggaggctgtgcgtatgggcattgtgggccccgagttcaaggacaagctgctgtcggccgagcgcgccgtcactgggtacaaggacccctactctgggaagctcatctccctcttccaggccatgaagaagggcctgatcctgaaggaccatggcatccgcctgctggaggcccagatcgccacgggcggcatcatcgaccctgaggagagccaccggctgcccgtggaggtggcctacaagcgcggcctcttcgatgaggagatgaacgagatcctgaccgacccctcggacgacaccaagggcttctttgaccctaacacggaggagaacctcacctacctgcagctgatggagcgttgtatcactgacccccagacgggcctgtgtctcttgccgctgaaggagaagaagcgggagcggaagacgtcctccaagtcctccgtgcgcaagcgccgagtggtcatcgtggaccccgagacgggcaaggagatgtcagtgtacgaggcctaccgcaagggcctgattgaccaccagacgtacctggagctgtccgagcaggagtgcgagtgggaggagatcaccatctcctcctcggacggcgtggtcaagtccatgatcatcgaccgccgctccgggcgccagtacgacatcgatgatgccatcgccaagaacctcatcgaccgctcggcactggaccagtaccgcgccggcacgctctccatcaccgagttcgccgacatgctctcgggcaacgccggtggtttccgctcccgttcctcctcggtgggatcctcctcctcctaccccatcagccccgccgtctccaggacccagctggcctcctggtcagaccccactgaggagacgggccccgtggctggcatcctggacacggagacgctggagaaggtgtccatcaccgaggccatgcaccggaacctggtggataacatcacggggcagcggctgctggaggcgcaggcctgcaccgggggcatcatcgaccccagcaccggtgagcgcttccctgtcaccgacgccgtcaacaagggcctggtggacaagatcatggtggaccgcatcaacctggcccagaaggccttctgcggcttcgaggacccacgcaccaagaccaagatgtcggccgcccaggccctgaagaagggctggctctactacgaggccggccagcgcttcctggaggtgcagtacctgaccggcggcttgatcgagcccgacacgccgggccgcgtgcccctggacgaggccctgcagcgcggcacggtggacgcccgcaccgcacagaagctgcgtgacgtgggcgcctactccaagtacctcacctgccctaagaccaagctcaagatctcctataaggacgcgctggaccgcagcatggtggaggagggcacggggctgcggctgctggaggctgccgcgcagtccaccaagggctactacagcccctacagcgtcagcggctccggctctaccgctggctcccgcaccggctcgcgcaccggctcccgggccggctcccgccgcggcagctttgacgccaccggctccggcttctccatgaccttctcttcatcctcctactcctcctcgggctacggccgccgctacgcctcggggtcctcggcctccctggggggccctgagtctgccgtggcctga

SEQ ID NO: 147 - DNA, 1467 bp, Homo sapiens
  source 1..1467: mol_type = unassigned DNA
atgtccactcccggggtcaattcgtccgcctccttgagccccgaccggctgaacagcccagtgaccatcccggcggtgatgttcatcttcggggtggtgggcaacctggtggccatcgtggtgctgtgcaagtcgcgcaaggagcagaaggagacgaccttctacacgctggtatgtgggctggctgtcaccgacctgttgggcactttgttggtgagcccggtgaccatcgccacgtacatgaagggccaatggcccgggggccagccgctgtgcgagtacagcaccttcattctgctcttcttcagcctgtccggcctcagcatcatctgcgccatgagtgtcgagcgctacctggccatcaaccatgcctatttctacagccactacgtggacaagcgattggcgggcctcacgctctttgcagtctatgcgtccaacgtgctcttttgcgcgctgcccaacatgggtctcggtagctcgcggctgcagtacccagacacctggtgcttcatcgactggaccaccaacgtgacggcgcacgccgcctactcctacatgtacgcgggcttcagctccttcctcattctcgccaccgtcctctgcaacgtgcttgtgtgcggcgcgctgctccgcatgcaccgccagttcatgcgccgcacctcgctgggcaccgagcagcaccacgcggccgcggccgcctcggttgcctcccggggccaccccgctgcctccccagccttgccgcgcctcagcgactttcggcgccgccggagcttccgccgcatcgcgggcgccgagatccagatggtcatcttactcattgccacctccctggtggtgctcatctgctccatcccgctcgtggtgcgagtattcgtcaaccagttatatcagccaagtttggagcgagaagtcagtaaaaatccagatttgcaggccatccgaattgcttctgtgaaccccatcctagacccctggatatatatcctcctgagaaagacagtgctcagtaaagcaatagagaagatcaaatgcctcttctgccgcattggcgggtcccgcagggagcgctccggacagcactgctcagacagtcaaaggacatcttctgccatgtcaggccactctcgctccttcatctcccgggagctgaaggagatcagcagtacatctcagaccctcctgccagacctctcactgccagacctcagtgaaaatggccttggaggcaggaatttgcttccaggtgtgcctggcatgggcctggcccaggaagacaccacctcactgaggactttgcgaatatcagagacctcagactcttcacagggtcaggactcagagagtgtcttactggtggatgaggctggtgggagcggcagggctgggcctgcccctaaggggagctccctgcaagtcacatttcccagtgaaacactgaacttatcagaaaaatgtatataa

SEQ ID NO: 148 - DNA, 4014 bp, Homo sapiens
  source 1..4014: mol_type = unassigned DNA
atgaagccggcggcgcgggaggcgcggctgcctccgcgctcgcccgggctgcgctgggcgctgccgctgctgctgctgctgctgcgcctgggccagatcctgtgcgcaggtggcacccctagtccaattcctgacccttcagtagcaactgttgccacaggggaaaatggcataacgcagatcagcagtacagcagaatcctttcataaacagaatggaactggaacacctcaggtggaaacaaacaccagtgaggatggtgaaagctctggagccaacgatagtttaagaacacctgaacaaggatctaatgggactgatggggcatctcaaaaaactcccagtagcactgggcccagtcctgtgtttgacattaaagctgtttccatcagtccaaccaatgtgatcttaacttggaaaagtaatgacacagctgcttctgagtacaagtatgtagtaaagcataagatggaaaatgagaagacaattactgttgtgcatcaaccatggtgtaacatcacaggcttacgtccagcgacttcatatgtattctccatcactccaggaataggcaatgagacttggggagatcccagagtcataaaagtcatcacagagccgatcccagtttctgatctccgtgttgccctcacgggtgtgaggaaggctgctctctcctggagcaatggcaatggcactgcctcctgccgggttcttcttgaaagcattggaagccatgaggagttgactcaagactcaagacttcaggtcaatatctcgggcctgaagccaggggttcaatacaacatcaacccgtatcttctacaatcaaataagacaaagggagaccccttgggcacagaaggtggcttggatgccagcaatacagagagaagccgggcagggagccccaccgcccctgtgcatgatgagtccctcgtgggacctgtggacccatcctccggccagcagtcccgagacacggaagtcctgcttgtcgggttagagcctggcacccgatacaatgccaccgtttattcccaagcagcgaatggcacagaaggacagccccaggccatagagttcaggacaaatgctattcaggtttttgacgtcaccgctgtgaacatcagtgccacaagcctgaccctgatctggaaagtcagcgataacgagtcgtcatctaactatacctacaagatacatgtggcgggggagacagattcttccaatctcaacgtcagtgagcctcgcgctgtcatccccggactccgctccagcaccttctacaacatcacagtgtgtcctgtcctaggtgacatcgagggcacgccgggcttcctccaagtgcacaccccccctgttccagtttctgacttccgagtgacagtggtcagcacgacggagatcggcttagcatggagcagccatgatgcagaatcatttcagatgcatatcacacaggagggagctggcaattctcgggtagaaataaccaccaaccaaagtattatcattggtggcttgttccctggaaccaagtattgctttgaaatagttccaaaaggaccaaatgggactgaaggggcatctcggacagtttgcaatagaactgttcccagtgcagtgtttgacatccacgtggtctacgtcaccaccacggagatgtggctggactggaagagccctgacggtgcttccgagtatgtctaccatttagtcatagagtccaagcatggctctaaccacacaagcacgtatgacaaagcgattactctccagggcctgattccgggcaccttatataacatcaccatctctccagaagtggaccacgtctggggggaccccaactccactgcacagtacacacggcccagcaatgtgtccaacattgatgtaagtaccaacaccacagcagcaactttaagttggcagaactttgatgacgcctctcccacgtactcctactgccttcttattgagaaggctggaaattccagcaacgcaacacaagtagtcacggacattggaattactgacgctacagtcactgaattaatacctggctcatcatacacagtggagatctttgcacaagtaggggatgggatcaagtcactggaacctggccggaagtcattctgtacagatcctgcgtccatggcctccttcgactgcgaagtggtccccaaagagccagccctggttctcaaatggacctgccctcctggcgccaatgcaggctttgagctggaggtcagcagtggagcctggaacaatgcgacccacctggagagctgctcctctgagaatggcactgagtatagaacggaagtcacgtatttgaatttttctacctcgtacaacatcagcatcaccactgtgtcctgtggaaagatggcagcccccacccggaacacctgcactactggcatcacagatccccctcctccagatggatcccctaatattacatctgtcagtcacaattcagtaaaggtcaagttcagtggatttgaagccagccacggacccatcaaagcctatgctgtcattctcaccaccggggaagctggtcacccttctgcagatgtcctgaaatacacgtatgaggatttcaaaaagggagcctcagatacttatgtgacatacctcataagaacagaagaaaagggacgttctcagagcttgtctgaagttttgaaatatgaaattgacgttgggaatgagtcaaccacacttggttattacaatgggaagctggaacctctgggctcctaccgggcttgtgtggctggcttcaccaacattaccttccaccctcaaaacaaggggctcattgatggggctgagagctatgtgtccttcagtcgctactcagatgctgtttccttgccccaggatccaggtgtcatctgtggagcggtttttggctgtatctttggtgccctggttattgtgactgtgggaggcttcatcttctggagaaagaagaggaaagatgcaaagaataatgaagtgtccttttctcaaattaaacctaaaaaatctaagttaatcagagtggagaattttgaggcctacttcaagaagcagcaagctgactccaactgtgggttcgcagaggaatacgaagatctgaagcttgttggaattagtcaacctaaatatgcagcagaactggctgagaatagaggaaagaatcgctataataatgttctgccctatgatatttcccgtgtcaaactttcggtccagacccattcaacggatgactacatcaatgccaactacatgcctggctaccactccaagaaagattttattgccacacaaggacctttaccgaacactttgaaagatttttggcgtatggtttgggagaaaaatgtatatgccatcattatgttgactaaatgtgttgaacagggaagaaccaaatgtgaggagtattggccctccaagcaggctcaggactatggagacataactgtggcaatgacatcagaaattgttcttccggaatggaccatcagagatttcacagtgaaaaatatccagacaagtgagagtcaccctctgagacagttccatttcacctcctggccagaccacggtgttcccgacaccactgacctgctcatcaacttccggtacctcgttcgtgactacatgaagcagagtcctcccgaatcgccgattctggtgcattgcagtgctggggtcggaaggacgggcactttcattgccattgatcgtctcatctaccagatagagaatgagaacaccgtggatgtgtatgggattgtgtatgaccttcgaatgcataggcctttaatggtgcagacagaggaccagtatgttttcctcaatcagtgtgttttggatattgtcagatcccagaaagactcaaaagtagatcttatctaccagaacacaactgcaatgacaatctatgaaaaccttgcgcccgtgaccacatttggaaagaccaatggttacatcgcctaa

SEQ ID NO: 149 - DNA, 1026 bp, Homo sapiens
  source 1..1026: mol_type = unassigned DNA
atggtcggggaaatggaaacgaaggagaagccgaagcccaccccagattacctgatgcagctgatgaacgacaagaagctcatgagcagcctgcccaacttctgcgggatcttcaaccacctcgagcggctgctggacgaagaaattagcagagtacggaaagacatgtacaatgacacattaaatggcagtacagagaaaaggagtgcagaattgcctgatgctgtgggacctattgttcagttacaagagaaactttatgtgcctgtaaaagaatacccagattttaattttgttgggagaatccttggacctagaggacttacagccaaacaacttgaagcagaaaccggatgtaaaatcatggtccgaggcaaaggctcaatgagggataaaaaaaaggaggagcaaaatagaggcaagcccaattgggagcatctaaatgaagatttacatgtactaatcactgtggaagatgctcagaacagagcagaaatcaaattgaagagagcagttgaagaagtgaagaaattattggtacctgcagcagaaggagaagacagcctgaagaagatgcagctgatggagcttgcgattctgaatggcacctacagagatgccaacattaaatcaccagcccttgccttttctcttgcagcaacagcccaggctgctccaaggatcattactgggcctgcgccggttctcccaccagctgccctgcgtactcctacgccagctggccctaccataatgcctttgatcagacaaatacagaccgctgtcatgccaaacggaactcctcacccaactgctgcaatagttcctccagggcccgaagctggtttaatctatacaccctatgagtacccctacacattggcaccagctacatcaatccttgagtatcctattgaacctagtggtgtattaggtgcggtggctactaaagttcgaaggcacgatatgcgtgtccatccttaccaaaggattgtgaccgcagaccgagccgccaccggcaactaa

SEQ ID NO: 150-151 - skipped (2 entries)

SEQ ID NO: 152 - DNA, 2409 bp, Homo sapiens
  source 1..2409: mol_type = unassigned DNA
atggaggaggagggtggcagcagcggcggcgccgcggggaccagcgcggacggcggcgacggaggagagcagctcctcactgtcaagcacgagctgcggactgctaatttgacaggacatgctgagaaggtgggaatagaaaattttgagctcctgaaggtcctaggaactggagcttatggaaaagtatttctagttcgtaaaataagtggccatgatactggaaagctgtatgccatgaaagttttgaaaaaggcaacaatcgttcaaaaggccaaaaccacagagcatacaaggacagaacgacaagtcctggaacacattaggcagtcgccatttttggtaacattacattatgctttccagacagaaaccaaacttcatctcattttagattatataaatggtggtgaactttttactcatctttctcaaagagagcgtttcacagagcatgaggtgcagatttatgttggagagattgtgcttgccctcgaacatctccacaagttggggattatatatcgtgatattaagcttgagaatattctacttgattctaatggccatgtggtgctgacagattttggtctgagtaaggagtttgtggctgatgaaactgaaagagcatattccttttgtggaactattgaatacatggcaccagatattgtcagagggggagattcaggacatgacaaggcagttgactggtggagtttgggtgttctaatgtatgaattactaactggagcatctcctttcactgttgatggagaaaaaaattcccaagctgagatatctaggagaatattaaaaagtgagcctccatatccccaagaaatgagtgctttagcgaaagacctaattcagcgtcttttgatgaaagatcccaagaagagattgggatgtggtccacgtgatgcagatgaaatcaaagaacatctcttctttcagaaaataaattgggatgatttagccgccaaaaaagtgcctgcaccatttaagccagtcattcgagatgaattagatgtgagtaactttgcagaagagttcacagaaatggatcccacttattctcccgcagccctgccccagagttctgagaagctgtttcagggctattcctttgttgctccttccatcctattcaagcgtaatgcagctgtcatagaccctcttcagtttcacatgggagttgaacgtcctggagtgacaaatgttgccaggagtgcaatgatgaaggactctccattctatcaacactatgacctagatttgaaggacaaacccctgggagaaggtagtttttcaatttgtcgaaagtgtgtgcataaaaaaagtaaccaagcttttgcagtcaaaataatcagcaaaaggatggaagccaatactcaaaaggaaataacagctctgaaactctgtgaaggacaccccaatattgtgaagttgcatgaagtttttcatgatcagcttcacacgtttctagtgatggaacttctgaatggaggagaactgtttgagcgcattaagaaaaagaagcacttcagtgagacggaagccagctacatcatgaggaagcttgtttcagctgtaagccacatgcatgatgttggagtggtgcacagggatctgaaacctgagaatttattgttcaccgatgaaaatgacaatttggaaattaaaataattgattttggatttgcacggctaaagccaccggataatcagcccctgaagactccatgcttcacccttcattatgccgccccagagctcttgaatcagaacggctacgatgagtcctgtgacctgtggagcttgggcgtcattttgtacacaatgttgtcaggacaggttcccttccaatctcatgaccgaagtttgacgtgtaccagcgcggtggaaatcatgaagaaaattaaaaagggagatttctcctttgaaggagaagcctggaagaatgtatcccaagaggctaaagatttgatccaaggacttctcacagtagatccaaacaaaaggcttaaaatgtctggcttgaggtacaatgaatggctacaagatggaagtcagctgtcctccaatcctctgatgactccggatattctaggatcttccggagctgccgtgcatacctgtgtgaaagcaaccttccacgcctttaacaaatacaagagagaggggttttgccttcagaatgttgataaggcccctttggctaagagaagaaaaatgaaaaagactagcaccagtaccgagacgcgcagcagttccagtgagagttcccattcttcttcctctcattctcacggtaaaactacacccaccaagacactgcagcccagcaatcctgccgacagcaataacccggagaccctcttccagttctcggactcagtagcttag

SEQ ID NO: 153 - DNA, 3744 bp, Homo sapiens
  source 1..3744: mol_type = unassigned DNA
atggaggacgcgggagcagctggcccggggccggagcctgagcccgagcccgagccggagcccgagcccgcgccggagccggaaccggagcccaagccgggtgctggcacatccgaggcgttctcccgactctggaccgacgtgatgggtatcctggacggttcactgggaaacatcgatgacctggcgcagcagtatgcagattattacaacacctgtttctccgacgtgtgcgagaggatggaggagctgcggaaacggcgggtttcccaggacctggaagtggagaaacccgatgctagccccacgtcacttcagctgcggtcccagatcgaagagtcgcttggcttctgtagcgccgtgtcaaccccagaagtggaaagaaagaaccctcttcataaatcaaactcagaagacagctctgtaggaaaaggagactggaagaagaaaaataagtatttctggcagaacttccgaaagaaccagaaaggaataatgagacagacttcaaaaggagaagacgttggttatgttgccagtgaaataacgatgagcgatgaggagcggattcagctaatgatgatggtcaaagaaaagatgatcacaattgaggaagcacttgctaggctcaaggaatacgaggcccagcaccggcagtcggctgccctggaccctgctgactggccagatggttcttacccaacgtttgatggctcatcaaactgcaattcaagagaacaatcggatgatgagactgaggagtcggtgaagtttaagaggttacacaagctggtaaactccactcgcagagtcagaaagaaactaattagggtggaagaaatgaaaaaacccagcactgaaggtggggaggagcacgtgtttgagaattcgccggtcctggatgaacggtccgccctctactctggcgtgcacaagaagccccttttctttgatggctctcctgagaaacctcccgaagatgactcagactctctcaccacgtctccatcctccagcagcctggacacctggggggctggccggaagttggtcaaaaccttcagcaaaggagagagccggggcctgattaagccccccaagaagatggggacattcttctcctacccagaagaagaaaaggcccagaaagtgtcccgctccctcaccgagggggagatgaagaagggtctcgggtccctaagccacgggagaacctgcagttttggaggatttgacttgacgaatcgctctctgcacgttggcagtaataattctgacccaatgggtaaagaaggagactttgtgtacaaagaagtcatcaaatcacctactgcctctcgcatctctcttgggaaaaaggtgaaatcagtgaaagagacgatgagaaagagaatgtctaaaaaatacagcagctctgtctctgagcaggactcgggccttgatggaatgcctggctcccctccgccttcacagcccgaccccgaacacttggacaagcccaagctcaaggccgggggttctgtagaaagtcttcgcagttctctcagtgggcagagctccatgagcggtcaaacagtgagcaccactgattcctcaaccagcaaccgggaaagcgtcaagtcggaagatggggatgacgaagagccgccttaccgaggcccgttctgcgggcgtgccagggtgcacaccgacttcacccccagtccctatgacacagactcactcaagctcaagaaaggagatatcatcgatataatcagcaagccacccatggggacctggatgggcctgctgaacaacaaagtcggcacgttcaagttcatctacgtggacgtgctcagtgaagacgaggagaaacccaaacgccccaccaggaggcgtcggaaaggacgaccaccccagcccaagtctgtggaggatctcctggatcggattaacctaaaagagcacatgcccactttcctgttcaatggatatgaagatttggacacctttaagctgctggaggaggaagacttggatgagttaaatatcagggacccggaacacagagctgttctcttgacagcagtggagctgttacaagagtatgacagtaacagcgaccagtcaggatcccaggagaagctgctcgttgacagccagggcctgagtggatgctcaccccgagactcaggatgctacgaaagcagtgagaacctggaaaacggcaagactcggaaagctagcctcctatctgccaagtcatccaccgagcccagcttgaagtcttttagcagaaaccagttgggcaattacccaacattgcctttaatgaaatcaggggatgcactgaagcagggacaggaggagggcaggctgggtggtggccttgccccagacacgtccaagagctgtgacccacctggtgtgactggtttgaataaaaaccgaagaagcctcccagtttccatctgccggagctgtgagaccctggagggcccccagactgtggacacttggccccgatcccattccctggatgaccttcaagtggagcctggtgctgagcaagacgtgcctaccgaggtgacagaaccgccccctcagattgtacctgaagtgccacagaagacgaccgcctcttccacgaaggcccagcccctggagcaagactctgctgtcgacaatgcattgctactgacccaaagcaagagattttctgaacctcagaaattgacaactaagaaactggagggctcaatcgcagcctctggtcgcggcctgtcaccccctcagtgtttgcccagaaactatgatgctcagcctcctggagctaaacacggtttagcaaggacgcctctggagggccacagaaaaggacacgagtttgaaggaacacaccatcccctgggcaccaaagaaggggtagatgctgagcagagaatgcagcccaaaattccatcacagcctccacctgttcctgccaaaaagagcagagaacgccttgctaacggactccaccctgttcccatgggccccagtggggccctccccagtcccgatgcgccatgcctgccagtgaaaaggggcagccccgccagccccaccagccctagcgactgtcccccagcactggctcccaggcctctctcagggcaggcgcctggcagcccaccaagcacaaggccgcccccctggctctcagagctccccgagaacacaagcctccaggagcacggtgtgaagctgggcccggctttgaccaggaaggtctcctgtgcccggggagtggatctagaaacgctcactgaaaacaagctgcacgctgaaggcatcgatctcacggaggagccgtattctgataagcatggccgctgtgggattcctgaagccctggtgcagagatacgcagaggacttggatcagcccgagcgggacgtcgccgccaacatggaccagatccgggtgaagcagcttcggaagcagcaccgcatggcgattccaagtggtggactcacggaaatctgccgaaagcccgtctctcctgggtgcatttcgtctgtgtcagattggctcatttccatcggtctgcccatgtacgccggcaccctctccaccgcgggcttcagcacactgagccaagtgccttctctgtctcacacttgccttcaggaggccggcatcacagaggagagacacataagaaagctcctatctgcagccagactcttcaaactgccgccaggccctgaggccatgtag

SEQ ID NO: 154 - DNA, 3183 bp, Homo sapiens
  source 1..3183: mol_type = unassigned DNA
atggaactttgggctccccagaggctgccccagacacgagggaaggccacagcaccctcaaaggatccagaccgagggtttcggagagatggacatcatcggcctgtccctcactcttggcacaatggagagaggtttcaccaatggcaagacaaccgtgggagcccccagccacagcaggagcccagggcagaccatcagcagcagccccattatgcatccaggccaggggactggcatcagcctgtgtctggagttgactattacgaaggtggttatcgcaatcagttgtattcaaggccaggttatgagaattcatatcagagctatcagtctcccacaatgagggaggaatatgcttatggaagttattactatcatggacacccacagtggctgcaggaagaaagagtgccaaggcaacggagtccttatatctggcacgaagattaccgagagcaaaagtaccttgatgaacatcattatgaaaaccagcacagtccatttggaacaaatagtgagacccacttccaatctaacagtaggaacccttgtaaagacagccctgcttccaactctggacaggagtggccgggggagctgtttccagggagcctgcttgctgaggcccagaaaaataagccatcattggctagtgagtccaaccttctccagcagcgtgagtctggtctcagctccagcagctatgagctcagtcagtacatcagagatgccccggagcgggatgatcccccagcttcagcagcttggagtccagttcaggctgatgtctcctcagctggtcccaaagcacccatgaagttctacatccctcatgttcctgtgagtttcgggccaggaggtcagctggtgcatgtaggtcccagctctcccactgacgggcaagcagcccttgttgaactgcacagcatggaggttattcttaatgattccgaagagcaagaggagatgagaagtttctcaggacccttgattagggaagatgtacataaggtggatattatgacgttttgccagcagaaagcagctcagagctgcaaatctgagacactggggagcagagactcagctctactgtggcagctcttggttctcctttgtcgccagaatgggtccatggtggggtctgacatcgctgagctgctaatgcaagactgcaagaagctggagaagtacaagcggcagccccctgtggccaacctcatcaacctgaccgatgaggactggccagtgctgagctctgggaccccgaacctgctcacgggagagatcccccccagtgtggagacacctgcgcagatcgtggagaaattcactaggctgctctactatggaaggaagaaggaagccttggagtgggccatgaagaaccacttgtggggccatgctttgttcctgtccagcaagatggacccacagacctacagctgggtcatgagtggcttcaccagcacgctggcgctcaatgacccactgcagaccctcttccagctcatgtcggggaggattccacaggcagccacgtgttgtggagaaaagcagtggggagactggaggcctcacttggctgtgattctgtcgaatcaggctggggacccagagctgtatcagcgtgcgattgttgccattggggacaccctggctgggaaggggcttgtggaggcagctcacttctgctatctcatggctcacgtgccctttggccactacaccgtgaagacagaccatctggtcttgctgggcagcagccacagtcaagagtttttgaaatttgcaacaactgaggcaatccagaggacggaaatcttcgagtactgtcagatgctgggccgccccaaatccttcatcccttctttccaggtgtataagctcctttatgcttcccgtctggcagattatggcctcgtgtcccaggctttgcattactgcgaagccattggtgcagctgtcttgagccagggagagagcagtcaccctgtgctattagtggaactcatcaagctagcagagaaactgaagctgtcagatcctctggttttagaaagacgcagtggagacagggacctggagccagattggctagcgcaacttcggaggcagctggagcaaaaggtagcaggagacattggggatcctcatcctactcgctcagatatttcgggagccggaggaacaacaacagaaaacactttctaccaggacttttctggatgtcaaggctactctgaagcccctgggtaccgctcagctctgtggctgacacctgagcagacctgcctgctccagcccagcccacagcagccctttcccctccagccgggctcctacccagcaggagggggtgcagggcagacagggacaccgaggcctttttactcagttcctgagacccatctaccagggactggcagcagcgtggcagtgacagaggccactggaggaacagtctgggaggaaatgctgcagacacacctgggccctggagagaacacagtgtctcaagaaacttcccagcctcctgatggccaagaggtcatttccaaaccacagacaccattggctgctagaccacgaagtatttctgagagttccgccagttcagccaaggaggatgagaaggagtcctctgatgaggctgataaaaactctccccgaaatactgcccagagaggcaagctcggagatgggaaggagcatacaaagagctcagggtttggctggttcagctggtttcgatcgaagcccaccaagaacgcatcccccgctggagacgaggactcctcagacagccctgactctgaggagacccccagagcatcttctccccaccaggctggcctgggcctctcactgacaccttcccctgagtccccacctctgccggatgttagtgccttctccaggggcagaggtgggggtgaaggccgaggatccgcatccagcgggggagcagctgcgggcgctggggttggaggcttgtctggaccagagagtgtttcctttgagctctgctccaaccctggtgttcttcttcctccacctgccttaaaaggggctgttcctctttacaacccatctcaggtgcctcagctgcccacggccactagcctgaatcggccaaatcgcctagctcagcgtcgctatcccacccagccatgctga

SEQ ID NO: 155 - skipped

SEQ ID NO: 156 - DNA, 1080 bp, Homo sapiens
  source 1..1080: mol_type = unassigned DNA
atgcaggccgccgccctccctgaggagatccgttggctcctggaagatgctgaagagtttctggcagaaggtttgcggaatgagaacctcagcgctgttgcaagggatcacagagaccatattctacggggctttcagcaaatcaaagccaggtactattgggattttcagccccaagggggagacattggacaggacagctctgatgataatcacagcgggactcttggcctgtccctcacatccgatgcaccctttttgtcagattatcaggatgagggaatggaagacatcgtaaaaggagctcaagaacttgataacgtaatcaagcaaggatacttggagaagaaaagcaaagatcatagtttctttggatcggagtggcagaagcgatggtgtgttgtcagcagaggtctcttctactactatgctaatgagaagagcaagcagcccaaagggaccttcctcattaagggctacggtgtacggatggccccccacctgcgaagagattccaagaaagaatcctgctttgaactgacctcccaggataggcgcagctatgagtttacagctactagtccagcagaagccagagactgggtggatcaaataagtttcttgttaaaggatctgagctccttaaccattccatatgaagaggatgaggaggaagaagaaaaagaagagacatatgatgatattgatggttttgactccccaagttgtggttcccagtgcagacccactatcttgcctgggagtgtggggataaaagagcctacagaggagaaagaagaagaagatatttatgaagtcttgccagatgaagagcatgatctagaagaggatgagagtggcactcgacgaaaaggagtagactatgccagttactaccagggcctatgggattgccatggtgaccagccagatgaactgtccttccaacggggtgacctcatccgtattctgagcaaggagtataacatgtatggctggtgggtgggagaactgaacagcctcgttgggattgttccaaaggagtatctcaccactgcctttgaagtggaagaaagatga

SEQ ID NO: 157 - skipped

SEQ ID NO: 158 - DNA, 2028 bp, Homo sapiens
  source 1..2028: mol_type = unassigned DNA
atggcggccgccaaggtggctttaaccaagagagcagatccagctgagcttagaacaatatttttgaagtatgcaagcattgagaaaaacggtgaatttttcatgtcccccaatgactttgtcactcgatacttgaacatttttggagaaagccagcctaatccaaagactgtggaacttttaagtggagtggtggatcagaccaaagatggattaatatcttttcaagaatttgttgcctttgaatctgtcctgtgtgcccctgatgctttgtttatggtagcctttcagctgtttgacaaagctggcaaaggagaagtaacttttgaggatgttaagcaagtttttggacagaccacaattcatcaacatattccatttaactgggattcagaatttgtgcaactacattttggaaaagaaagaaaaagacacctgacatatgcggaatttactcagtttttattggaaatacaactggagcacgcaaagcaagcctttgtgcaacgggacaatgctaggactgggagagtcacagccatcgacttccgagacatcatggtcaccatccgcccccatgtcttgactccttttgtagaagaatgtctagtagctgctgctggaggtaccacatcccatcaagttagtttctcctattttaatggatttaattcgctccttaacaacatggaactcattagaaagatctatagcactctggctggcaccaggaaagatgttgaagtgactaaggaggagtttgttctggcagctcagaaatttggtcaggttacacccatggaagttgacatcttgtttcagttagcagatttatatgagccaaggggacgtatgaccttagcagacattgaacggattgctcctctggaagagggaactctgccctttaacttggctgaggcccagaggcagaaggcctcaggtgattcagctcgaccagttcttctacaagttgcagagtcggcctacaggtttggtctgggttctgttgctggagctgttggagccactgctgtgtatcctatcgatcttgtaaaaactcgaatgcagaaccaacgatcaactggctcttttgtgggagaactcatgtataaaaacagctttgactgttttaagaaagtgctacgctatgaaggcttctttggactgtatagaggtctgttgccacagttattgggagttgccccagagaaggccataaaacttacagtgaacgattttgtgagggataaatttatgcacaaagatggttcggtcccacttgcagcagaaattcttgctggaggctgcgctggaggctcccaggtgattttcacaaatcctttagaaatcgtcaagatccgtttgcaagtggcaggagaaatcaccactggtcctcgagtcagtgctctgtctgtcgtgcgggacctggggttttttgggatctacaagggtgccaaagcatgctttctgcgggacattcctttctcggccatctactttccgtgctatgctcatgtgaaggcttcctttgcaaatgaagatgggcaggttagcccaggaagcctgctcttagctggtgccatagctggtatgcctgcagcatctttagtgacccctgctgatgttatcaagacgagattacaggtggctgcccgggctggccaaaccacttacagcggagtgatagactgctttagaaagatactgcgtgaagaaggaccaaaagctctgtggaagggagctggtgctcgtgtatttcgatcctcaccccagtttggtgtaactttgctgacttacgaattgctacagcgatggttctacattgattttggaggagtaaaacccatgggatcagagccagttcctaaatccaggatcaacctgcctgccccgaatcctgatcacgttgggggctacaaactggcagttgctacatttgcagggattgaaaacaaatttggactttacctacctctcttcaagccatcagtatctacctcaaaggctattggtggaggcccatag

SEQ ID NO: 159 - DNA, 1386 bp, Homo sapiens
  source 1..1386: mol_type = unassigned DNA
atggggacaattcatctctttcgaaaaccacaaagatccttttttggcaagttgttacgggaatttagacttgtagcagctgaccgaaggtcctggaagatactgctctttggtgtaataaacttgatatgtactggcttcctgcttatgtggtgcagttctactaatagtatagctttaactgcctatacttacctgaccatttttgatctttttagtttaatgacatgtttaataagttactgggtaacattgaggaaacctagccctgtctattcatttgggtttgaaagattagaagtcctggctgtatttgcctccacagtcttggcacagttgggagctctctttatattaaaagaaagtgcagaacgctttttggaacagcccgagatacacacgggaagattattagttggtacttttgtggctctttgtttcaacctgttcacgatgctttctattcggaataaaccttttgcttatgtctcagaagctgctagtacgagctggcttcaagagcatgttgcagatcttagtcgaagcttgtgtggaattattccgggacttagcagtatcttccttccccgaatgaatccatttgttttgattgatcttgctggagcatttgctctttgtattacatatatgctcattgaaattaataattattttgccgtagacactgcctctgctatagctattgccttgatgacatttggcactatgtatcccatgagtgtgtacagtgggaaagtcttactccagacaacaccaccccatgttattggtcagttggacaaactcatcagagaggtatctaccttagatggagttttagaagtccgaaatgaacatttttggaccctaggttttggctcattggctggatcagtgcatgtaagaattcgacgagatgccaatgaacaaatggttcttgctcatgtgaccaacaggctgtacactctagtgtctactctaactgttcaaattttcaaggatgactggattaggcctgccttattgtctgggcctgttgcagccaatgtcctaaacttttcagatcatcacgtaatcccaatgcctcttttaaagggtactgatgatttgaacccagttacatcaactccagctaaacctagtagtccacctccagaattttcatttaacactcctgggaaaaatgtgaacccagttattcttctaaacacacaaacaaggccttatggttttggtctcaatcatggacacacaccttacagcagcatgcttaatcaaggacttggagttccaggaattggagcaactcaaggattgaggactggttttacaaatataccaagtagatatggaactaataatagaattggacaaccaagaccatga

SEQ ID NO: 160 - skipped

SEQ ID NO: 161 - DNA, 1413 bp, Homo sapiens
  source 1..1413: mol_type = unassigned DNA
atgcacttttccattcccgaaaccgagtcccgcagcggggacagcggcggctccgcctacgtggcctataacattcacgtgaatggagtcctgcactgtcgggtgcgctacagccagctcctggggctgcacgagcagcttcggaaggagtatggggccaatgtgcttcctgcattccccccaaagaagcttttctctctgactcctgctgaggtagaacagaggagagagcagttagagaagtacatgcaagctgttcggcaagacccattgcttgggagcagcgagactttcaacagtttcctgcgtcgggcacaacaggagacacagcaggtccccacagaggaagtgtccttggaagtgctgctcagcaacgggcagaaagttctggtcaacgtgctaacttcagatcagactgaggatgtcctggaggctgtagctgcaaagctggatcttccagatgacttgattggatactttagtctattcttagttcgagaaaaagaggatggagccttttcttttgtacggaagttgcaagagtttgagctgccttatgtgtctgtcaccagccttcggagtcaagagtataagattgtgctaaggaagagttattgggactctgcctatgatgacgatgtcatggagaaccgggttggcctgaacctgctttatgctcagacggtatcagatattgagcgtgggtggatcttggtcaccaaggaacagcaccggcaactcaaatctctgcaagagaaagtctccaagaaggagttcctgagactggcccagacgctgcggcactatggctacttgcgctttgatgcctgtgtggctgacttcccagaaaaggactgtcctgtggtggtgagcgcgggcaacagtgagctcagcctgcagctccgcctgcctggccagcaactccgagaaggctccttccgggtcacccgcatgcgatgctggcgggtcacctcctctgtaccattgcccagtggaagcacgagcagcccaggccggggccggggtgaggtgcgcctggaactggcttttgaatacctcatgagcaaggaccggctacagtgggtcaccatcactagcccccaggctatcatgatgagcatctgcttgcagtccatggttgatgaactgatggtgaagaaatctggcggcagtatcaggaagatgctgcgccggcgggtggggggtactctgagacgctcagacagccagcaagcagtgaagtccccaccactgcttgagtcacctgatgccacccgggagtctatggtcaaactctcaagtaagctgagtgccgtgagcttgcggggaattggcagtcccagcacagatgccagtgccagtgatgtccacggcaatttcgccttcgagggcattggagatgaggatctgtaa

SEQ ID NO: 162 - DNA, 1869 bp, Homo sapiens
  source 1..1869: mol_type = unassigned DNA
atgtccatgaggagccccatctctgcccagctggccctggatggcgttggcaccatggtgaactgcaccatcaagtcagaggagaagaaagagccttgccacgaggccccccagggctcagccactgccgctgaacctcagcctggagacccagcccgggcctcccaggatagtgctgacccccaagctccagcccaggggaatttcaggggctcctgggactgtagctctccagagggtaatgggtccccagaacccaagagaccaggagtgtcggaggctgcctctggaagccaggagaagctggacttcaaccgaaatttgaaagaagtggtgccagccatagagaagctgttgtccagtgactggaaggagaggtttctaggaaggaactctatggaagccaaagatgtcaaagggacccaagagagcctagcagagaaggagctccagcttctggtcatgattcaccagctgtccaccctgcgggaccagctcctgacagcccactcggagcagaagaacatggctgccatgctgtttgagaagcagcagcagcagatggagcttgcccggcagcagcaggagcagattgcaaagcagcagcagcagctgattcagcagcagcataagatcaacctccttcagcagcagatccagcaggttaacatgccttatgtcatgatcccagccttccccccaagccaccaacctctgcctgtcacccctgactcccagctggccttacccattcagcccattccctgcaaaccagtggagtatccgctgcagctgctgcacagcccccctgccccagtggtgaagaggcctggggccatggccacccaccaccccctgcaggagccctcccagcccctgaacctcacagccaagcccaaggcccccgagctgcccaacacctccagctccccaagcctgaagatgagcagctgtgtgccccgcccccccagccatggaggccccacgcgggacctgcagtccagccccccgagcctgcctctgggcttccttggtgaaggggacgctgtcaccaaagccatccaggatgctcggcagctgctgcacagccacagtggggccttggatggctcccccaacacccccttccgtaaggacctcatcagcctggactcatccccagccaaggagcggctggaggacggctgtgtgcacccactggaggaagccatgctgagctgcgacatggatggctcccgccacttccccgagtcccgaaacagcagccacatcaagaggcccatgaacgccttcatggtgtgggccaaggatgagcggaggaagatcctgcaagccttcccagacatgcacaactccagcatcagcaagatccttggatctcgctggaagtccatgaccaaccaggagaagcagccctactatgaggaacaggcgcggctgagccggcagcacctggagaagtatcctgactacaagtacaagccgcggcccaagcgcacctgcatcgtggagggcaagcggctgcgcgtgggagagtacaaggccctgatgaggacccggcgtcaggatgcccgccagagctacgtgatccccccgcaggctggccaggtgcagatgagctcctcagatgtcctgtaccctcgggcagcaggcatgccgctggcacagccactggtggagcactatgtccctcgtagcctggaccccaacatgcctgtgatcgtcaacacctgcagcctcagagaggagggtgagggcacagatgacaggcactcggtggctgatggcgagatgtaccggtacagcgaggacgaggactcggagggcgaagagaagagcgatggggagttggtggtgctcacagactga

SEQ ID NO: 163 - DNA, 717 bp, Homo sapiens
  source 1..717: mol_type = unassigned DNA
atgtcgcgttacgggcggtacggaggagaaaccaaggtgtatgttggtaacctgggaactggcgctggcaaaggagagttagaaagggctttcagttattatggtcctttaagaactgtatggattgcgagaaatcctccaggatttgcctttgtggaattcgaagatcctagagatgcagaagatgcagtacgaggactggatggaaaggtgatttgtggctcccgagtgagggttgaactatcgacaggcatgcctcggagatcacgttttgatagaccacctgcccgacgtccctttgatccaaatgatagatgctatgagtgtggcgaaaagggacattatgcttatgattgtcatcgttacagccggcgaagaagaagcaggtcacggtctagatcacattctcgatccagaggaaggcgatactctcgctcacgcagcaggagcaggggacgaaggtcaaggtcagcatctcctcgacgatcaagatctatctctcttcgtagatcaagatcagcttcactcagaagatctaggtctggttctataaaaggatcgaggtatttccaatccccgtcgaggtcaagatcaagatccaggtctatttcacgaccaagaagcagccgatcaaagtccagatctccatctccaaaaagaagtcgttccccatcaggaagtcctcgcagaagtgcaagtcctgaaagaatggactga

SEQ ID NO: 164 - DNA, 3285 bp, Homo sapiens
  source 1..3285: mol_type = unassigned DNA
atggcggcccgacaggccgtgggcagcggggctcaggagacatgcggtctggatcggattttggaggcattgaagctgctgctgagcccgggaggctcgggctcaagttcactacaggtcacaaaacatgatgtcttgttggctactttaaaatctaacctgtctgctttggaggacaagtttctgaaggatcctcagtggaagaatctgaaactcctaagagatgaaattgctgataaggcagaatggccacaaaactctgtggatgtcacttggagttttacctctcaaaccttgttgttgcttttgtgcttgaaggaaaccatgatccgccttgcagctaatttcaatccaggtaaacccaaccctaggactccggaagttgctcctgccctgagccccgatgcacttagtatctcacaacagaagactgtccagttcgttttgcagtttgtagttaccttgggtatctgcccctatctcatgcctggtgttggagtccctttgagatatagaactgaatttggtgccgtcgttcaagacgtggtgtgttttgatgctgcccccgatgcaactcgaagactgtacaccagctgcaaggcccttctgaatgttgctcagcacacatctctggggagcttgatcttctgccaccactttggggatatcgcagcaggtctgtgccaactgggattctgcccaaccaaaagaaaactgctaacacctgcagaagaggttctaactgaagaggagagaaccctatccaggggggccttgagagacatgctggatcaagtctatcagcccttagcagtccgggaactgcttatcctccagggaggaccaccccagtcctgcacagatgtgaagacacagatgaggtgtcgggccccagcttggcttcggcgtctatgtggacagctgctctctgaaaggttaatgagacctaatggtgttcaggcagtagtccggggcattttggaaggagcaggtgcgggagcagctggtggaagtgatgctgaggtgacggctgctgactggaagaagtgtgacctgatcgcaaagattttggcctcttgtccccagcagtctctttcaccagagaattactacagggacatctgcccccaggttctggatttatttcactttcaagataaattgacagcacgacaatttcagagagttgccaccactacctttataactttgtcaagagaacgcccacatttggcagcaaagtatttgctccagccagtgttagctcctcttcatcgatgtttgaatacagcagagctttcagagagtgacatggtaccaggaactattttggtgacagaagaagaacttagtagatgcattgaggatgtgtttaaggtgtacgtggttgggaatgaacctttaacagttttgatggattccctgcttccagtcctgggagtgctttttcttctctactgttttactaagcagagtgtgtctcacataaggtcactttgccaagaaatcttattatggattctggggaagctggaaaggaagaaggcaattgccagcctgaaaggatttgcagggttggacaaagctgtgccctctctccattctctgtgtcagtttagagttgccactcaaggtggcattatgattaccatcaaagaggccattagtgatgaagatgaagatgaagccctgtaccagaaggtatcctctgagcagggccgggtggagcatctcggggacttgctgtcccactgccaggaatgcggtttggcaggagacttcttcatcttctgtttgaaagagttgactcatgtggcctcggaaaatgaaacagagttaaaaactgagcccttctccagcaagagcctcttggaattagagcaacatcagactcttcttgtggaaggccaagagcggaagctgcttgtcctgcagctgatggctgttctgtgcgagagaatgtctgagcagatattcacaaacgtcactcaggtggtggactttgtagcagcaacattgcagagagcctgtgcaagcctggcccatcaggcagagagcaccgtggaatcacagacgctgagcatgtccatggggctggtggctgtcatgctaggaggagctgttcagttgaagtcaagtgattttgctgttctgaagcagttgttgcctctgttggagaaggtatccaacacataccctgatccggtcatccaagaactcgctgttgatctccgcatcaccatctctacccatggagcctttgccactgaggccgtcagcatggctgcccaaagtacactgaacagaaaagatctggaagggaaaatagaagagcagcaacaaaccagtcatgaaagacccactgatgtagctcatagccaccttgaacaacagcagagccatgagacagccccccagacaggcctgcagtcaaatgctccaatcattcctcaaggagtcaatgagcccagcactactacaagtcagaaatctggaagcgtaaccacagaacagctccaagaggttcttttgtcagcttatgaccctcaaattccaacacgggctgctgccctgcgtactctttcccactggatagagcagagagaagcaaaagcccttgagatgcaagagaagcttctcaagatattcttggaaaacttggaacatgaagacacttttgtatatctatctgcaattcagggggttgccctgctgtcagacgtctatcctgagaaaatcttgccggacttgttggctcaatatgacagcagcaaagacaagcacacaccagagaccagaatgaaagtcggggaagtccttatgcgaatcgtcagggcattaggagacatggtctcaaagtaccgagaacctttgatccataccttcctgaggggagtgagagatcctgatggtgctcacagggccagcagcttggccaaccttggggagctgtgccagaggctggactttctgctgggctccgtggtccatgaggtaacagcttgcctgattgctgtggccaaaacagatggtgaagttcaagtacgcagagctgccatacatgtggttgtgctgctgcttcggggactcagccagaaagctactgaggtgctgagcgccgtcctcaaggatctctaccacctgctgaagcacgtagtgtgtctggagcccgatgacgtggccaagctccatgcccagttggccctagaagagctggatgacatcatgaaaaacttcctgttccctccacagaagctggagaagaagatcatggtcctgccgtag

SEQ ID NO: 165 - DNA, 8307 bp, Homo sapiens
  source 1..8307: mol_type = unassigned DNA
atggccctggtcctggagatcttcaccctgctggcctccatctgctgggtgtcggccaatatcttcgagtaccaggtggatgcccagccccttcgtccctgtgagctgcagagggaaacggcctttctgaagcaagcagactacgtgccccagtgtgcagaggatggcagcttccagactgtccagtgccagaacgacggccgctcctgctggtgtgtgggtgccaacggcagtgaagtgctgggcagcaggcagccaggacggcctgtggcttgtctgtcattttgtcagctacagaaacagcagatcttactgagtggctacattaacagcacagacacctcctacctccctcagtgtcaggattcaggggactacgcgcctgttcagtgtgatgtgcagcaggtccagtgctggtgtgtggacgcagaggggatggaggtgtatgggacccgccagctggggaggccaaagcgatgtccaaggagctgtgaaataagaaatcgtcgtcttctccacggggtgggagataagtcaccaccccagtgttctgcggagggagagtttatgcctgtccagtgcaaatttgtcaacaccacagacatgatgatttttgatctggtccacagctacaacaggtttccagatgcatttgtgaccttcagttccttccagaggaggttccctgaggtatctgggtattgccactgtgctgacagccaagggcgggaactggctgagacaggtttggagttgttactggatgaaatttatgacaccatttttgctggcctggaccttccttccaccttcactgaaaccaccctgtaccggatactgcagagacggttcctcgcagttcaatcagtcatctctggcagattccgatgccccacaaaatgtgaagtggagcggtttacagcaaccagctttggtcacccctatgttccaagctgccgccgaaatggcgactatcaggcggtgcagtgccagacggaagggccctgctggtgtgtggacgcccaggggaaggaaatgcatggaacccggcagcaaggggagccgccatcttgtgctgaaggccaatcttgtgcctccgaaaggcagcaggccttgtccagactctactttgggacctcaggctacttcagccagcacgacctgttctcttccccagagaaaagatgggcctctccaagagtagccagatttgccacatcctgcccacccacgatcaaggagctctttgtggactctgggcttctccgcccaatggtggagggacagagccaacagttttctgtctcagaaaatcttctcaaagaagccatccgagcaatttttccctcccgagggctggctcgtcttgcccttcagtttaccaccaacccaaagagactccagcaaaacctttttggagggaaatttttggtgaatgttggccagtttaacttgtctggagcccttggcacaagaggcacatttaacttcagtcaatttttccagcaacttggtcttgcaagcttcttgaatggagggagacaagaagatttggccaagccactctctgtgggattagattcaaattcttccacaggaacccctgaagctgctaagaaggatggtactatgaataagccaactgtgggcagctttggctttgaaattaacctacaagagaaccaaaatgccctcaaattccttgcttctctcctggagcttccagaattccttctcttcttgcaacatgctatctctgtgccagaagatgtggcaagagatttaggtgatgtgatggaaacggtactcagctcccagacctgtgagcagacacctgaaaggctatttgtcccatcatgcacgacagaaggaagctatgaggatgtccaatgcttttccggagagtgctggtgtgtgaattcctggggcaaagagcttccaggctcaagagtcagaggtggacagccaaggtgccccacagactgtgaaaagcaaagggctcgcatgcaaagcctcatgggcagccagcctgctggctccaccttgtttgtccctgcttgtactagtgagggacatttcctgcctgtccagtgcttcaactcagagtgctactgtgttgatgctgagggtcaggccattcctggaactcgaagtgcaatagggaagcccaagaaatgccccacgccctgtcaattacagtctgagcaagctttcctcaggacggtgcaggccctgctctctaactccagcatgctacccaccctttccgacacctacatcccacagtgcagcaccgatgggcagtggagacaagtgcaatgcaatgggcctcctgagcaggtcttcgagttgtaccaacgatgggaggctcagaacaagggccaggatctgacgcctgccaagctgctagtgaagatcatgagctacagagaagcagcttccggaaacttcagtctctttattcaaagtctgtatgaggctggccagcaagatgtcttcccggtgctgtcacaatacccttctctgcaagatgtcccactagcagcactggaagggaaacggccccagcccagggagaatatcctcctggagccctacctcttctggcagatcttaaatggccaactcagccaatacccggggtcctactcagacttcagcactcctttggcacattttgatcttcggaactgctggtgtgtggatgaggctggccaagaactggaaggaatgcggtctgagccaagcaagctcccaacatgtcctggctcctgtgaggaagcaaagctccgtgtactgcagttcattagggaaacggaagagattgtttcagcttccaacagttctcggttccctctgggggagagtttcctggtggccaagggaatccggctgaggaatgaggacctcggccttcctccgctcttcccgccccgggaggctttcgcggagcagtttctgcgtgggagtgattacgccattcgcctggcggctcagtctaccttaagcttctatcagagacgccgcttttccccggacgactcggctggagcatccgcccttctgcggtcgggcccctacatgccacagtgtgatgcgtttggaagttgggagcctgtgcagtgccacgctgggactgggcactgctggtgtgtagatgagaaaggagggttcatccctggctcactgactgcccgctctctgcagattccacagtgcccgacaacctgcgagaaatctcgaaccagtgggctgctttccagttggaaacaggctagatcccaagaaaacccatctccaaaagacctgttcgtcccagcctgcctagaaacaggagagtatgccaggctgcaggcatcgggggctggcacctggtgtgtggaccctgcatcaggagaagagttgcggcctggctcgagcagcagtgcccagtgcccaagcctctgcaatgtgctcaagagtggagtcctctccaggagagtcagcccaggctatgtcccagcctgcagggcagaggatgggggcttttccccagtgcaatgtgaccaggcccagggcagctgctggtgtgtcatggacagcggagaagaggtgcctgggacgcgcgtgaccgggggccagcccgcctgtgagagcccgcggtgtccgctgccattcaacgcgtcggaggtggttggtggaacaatcctgtgtgagacaatctcgggccccacaggctctgccatgcagcagtgccaattgctgtgccgccagggctcctggagcgtgtttccaccagggccattgatatgtagcctggagagcggacgctgggagtcacagctgcctcagccccgggcctgccaacggccccagctgtggcagaccatccagacccaagggcactttcagctccagctcccgccgggcaagatgtgcagtgctgactacgcggatttgctgcagactttccaggttttcatattggatgagctgacagcccgcggcttctgccagatccaggtgaagacttttggcaccctggtttccattcctgtctgcaacaactcctctgtgcaggtgggttgtctgaccagggagcgtttaggagtgaatgttacatggaaatcacggcttgaggacatcccagtggcttctcttcctgacttacatgacattgagagagccttggtgggcaaggatctccttgggcgcttcacagatctgatccagagtggctcattccagcttcatctggactccaagacgttcccagcggaaaccatccgcttcctccaaggggaccactttggcacctctcccaggacatggtttgggtgctcggaaggattctaccaagtcttgacaagtgaggccagtcaggacggactgggatgcgttaagtgtcctgaaggaagctattcccaagatgaggaatgcattccttgtcctgttggattctaccaagaacaggcagggagcttggcctgtgtcccatgtcctgtgggcagaacgaccatttctgctggagctttcagccagactcactgtgtcactgactgtcagaggaacgaagcaggcctgcaatgtgaccagaatggccagtatcgagccagccagaaggacaggggcagtgggaaggccttctgtgtggacggcgaggggcggaggctgccatggtgggaaacagaggcccctcttgaggactcacagtgtttgatgatgcagaagtttgagaaggttccagaatcaaaggtgatcttcgacgccaatgctcctgtggctgtcagatccaaagttcctgattctgagttccccgtgatgcagtgcttgacagattgcacagaggacgaggcctgcagcttcttcaccgtgtccacgacggagccagagatttcctgtgatttctatgcttggacaagtgacaatgttgcctgcatgacttctgaccagaaacgagatgcactggggaactcaaaggccaccagctttggaagtcttcgctgccaggtgaaagtgaggagccatggtcaagattctccagctgtgtatttgaaaaagggccaaggatccaccacaacacttcagaaacgctttgaacccactggtttccaaaacatgctttctggattgtacaaccccattgtgttctcagcctcaggagccaatctaaccgatgctcacctcttctgtcttcttgcatgcgaccgtgatctgtgttgcgatggcttcgtcctcacacaggttcaaggaggtgccatcatctgtgggttgctgagctcacccagtgtcctgctttgtaatgtcaaagactggatggatccctctgaagcctgggctaatgctacatgtcctggtgtgacatatgaccaggagagccaccaggtgatattgcgtcttggagaccaggagttcatcaagagtctgacacccttagaaggaactcaagacacctttaccaattttcagcaggtttatctctggaaagattctgacatggggtctcggcctgagtctatgggatgtagaaaagacacagtgccaaggccagcatctccaacagaagcaggtttgacaacagaacttttctcccctgtggacctcaaccaggtcattgtcaatggaaatcaatcactatccagccagaagcactggcttttcaagcacctgttttcagcccagcaggcaaacctatggtgcctttctcgttgtgtgcaggagcactctttctgtcagctcgcagagataacagagagtgcatccttgtacttcacctgcaccctctacccagaggcacaggtgtgtgatgacatcatggagtccaatgcccagggctgcagactgatcctgcctcagatgccaaaggccctgttccggaagaaagttatactggaagataaagtgaagaacttttacactcgcctgccgttccaaaaactgatggggatatccattagaaataaagtgcccatgtctgaaaaatctatttctaatgggttctttgaatgtgaacgacggtgcgatgcggacccatgctgcactggctttggatttctaaatgtttcccagttaaaaggaggagaggtgacatgtctcactctgaacagcttgggaattcagatgtgcagtgaggagaatggaggagcctggcgcattttggactgtggctctcctgacattgaagtccacacctatcccttcggatggtaccagaagcccattgctcaaaataatgctcccagtttttgccctttggttgttctgccttccctcacagagaaagtgtctctggactcgtggcagtccctggccctctcttcagtggttgttgatccatccattaggcactttgatgttgcccatgtcagcactgctgccaccagcaatttctctgctgtccgagacctctgtttgtcggaatgttcccaacatgaggcctgtctcatcaccactctgcaaacccaacctggggctgtgagatgtatgttctatgctgatactcaaagctgcacacatagtctgcagggtcagaactgccgacttctgcttcgtgaagaggccacccacatctaccggaagccaggaatctctctgctcagctatgaggcatctgtaccttctgtgcccatttccacccatggccggctgctgggcaggtcccaggccatccaggtgggtacctcatggaagcaagtggaccagttccttggagttccatatgctgccccgcccctggcagagaggcgcttccaggcaccagagcccttgaactggacaggctcctgggatgccagcaagccaagggccagctgctggcagccaggcaccagaacatccacgtctcctggagtcagtgaagattgtttgtatctcaatgtgttcatccctcagaatgtggcccctaacgcgtctgtgctggtgttcttccacaacaccatggacagggaggagagtgaaggatggccggctatcgacggctccttcttggctgctgttggcaacctcatcgtggtcactgccagctaccgagtgggtgtcttcggcttcctgagttctgggtccggagaggtgagtggcaactgggggctgctggaccaggtggcggctctgacctgggtgcagacccacatccgaggatttggcggggaccctcggcgcgtgtccctggcagcagaccgtggcggggctgatgtggccagcatccaccttctcacggccagggccaccaactcccaacttttccggagagctgtgctgatgggaggctccgcactctccccggccgccgtcatcagccatgagagggctcagcagcaggcaattgctttggcaaaggaggtcagttgccccatgtcatccagccaagaagtggtgtcctgcctccgccagaagcctgccaatgtcctcaatgatgcccagaccaagctcctggccgtgagtggccctttccactactggggtcctgtgatcgatggccacttcctccgtgagcctccagccagagcactgaagaggtctttatgggtagaggtcgatctgctcattgggagttctcaggacgacgggctcatcaacagagcaaaggctgtgaagcaatttgaggaaagtcgaggccggaccagtagcaaaacagccttttaccaggcactgcagaattctctgggtggcgaggactcagatgcccgcgtcgaggctgctgctacatggtattactctctggagcactccacggatgactatgcctccttctcccgggctctggagaatgccacccgggactactttatcatctgccctataatcgacatggccagtgcctgggcaaagagggcccgaggaaacgtcttcatgtaccatgctcctgaaaactacggccatggcagcctggagctgctggcggatgttcagtttgccttggggcttcccttctacccagcctacgaggggcagttttctctggaggagaagagcctgtcgctgaaaatcatgcagtacttttcccacttcatcagatcaggaaatcccaactacccttatgagttctcacggaaagtacccacatttgcaaccccctggcctgactttgtaccccgtgctggtggagagaactacaaggagttcagtgagctgctccccaatcgacagggcctgaagaaagccgactgctccttctggtccaagtacatctcgtctctgaagacatctgcagatggagccaagggcgggcagtcagcagagagtgaagaggaggagttgacggctggatctgggctaagagaagatctcctaagcctccaggaaccaggctctaagacctacagcaagtga

SEQ ID NO: 166 - DNA, 2034 bp, Homo sapiens
  source 1..2034: mol_type = unassigned DNA
atgaaggtgttgggaagaagcttcttctgggtgctgtttcccgtccttccctgggcggtgcaggctgtggagcacgaggaggtggcgcagcgtgtgatcaaactgcaccgcgggcgaggggtggctgccatgcagagccggcagtgggtccgggacagctgcaggaagctctcagggcttctccgccagaagaatgcagttctgaacaaactgaaaactgcaattggagcagtggagaaagacgtgggcctgtcggatgaagagaaactgtttcaggtgcacacgtttgaaattttccagaaagagctgaatgaaagtgaaaattccgttttccaagctgtctacggactgcagagagccctgcagggggattacaaagatgtcgtgaacatgaaggagagcagccggcagcgcctggaggccctgagagaggctgcaataaaggaagaaacagaatatatggaacttctggcagcagaaaaacatcaagttgaagcccttaaaaatatgcaacatcaaaaccaaagtttatccatgcttgacgagattcttgaagatgtaagaaaggcagcggatcgtctggaggaagagatagaggaacatgcttttgacgacaataaatcagtcaagggggtcaattttgaggcagttctgagggtggaggaagaagaggccaattctaagcaaaatataacaaaacgagaagtggaggatgacttgggtcttagcatgctgattgactcccagaacaaccagtatattttgaccaagcccagagattcaaccatcccacgtgcagatcaccactttataaaggacattgttaccataggaatgctgtccttgccttgtggctggctatgtacagccataggattgcctacaatgtttggttatattatttgtggtgtacttctgggaccttcaggactaaatagtattaagtctattgtgcaagtggagacattaggagaatttggggtgttttttactctttttcttgttggcttagaattttctccagaaaagctaagaaaggtgtggaagatttccttacaagggccgtgttacatgacactgttaatgattgcatttggcttgctgtgggggcatctcttgcggatcaaacccacgcagagcgtcttcatttccacgtgtctgtccttgtcaagcacacccctcgtgtccaggttcctcatgggcagtgctcggggtgacaaagaaggcgacattgactacagcaccgtgctcctcggcatgctggtgacgcaggacgtgcagctcgggctcttcatggccgtcatgccgactctcatacaggcgggcgccagtgcatcttctagcattgtcgtggaagttctccgaatcctggttttgattggtcagattcttttttcactagcggcggtttttcttttatgtcttgttataaagaagtatctcattggaccctattatcggaagctgcacatggaaagcaaggggaacaaagaaatcctgatcttgggaatatctgcctttatcttcttaatgttaacggtcacggagctgctggacgtctccatggagctgggctgtttcctggctggagcgctcgtctcctctcagggccccgtggtcaccgaggagatcgccacctccatcgaacccatccgcgacttcctggccatcgttttcttcgcctccatagggctccacgtgttccccacgtttgtggcgtacgagctcacggtgctggtgttcctcaccttgtcagtggtggtgatgaagtttctcctggcggcgctggtcctgtctctcattctgccgaggagcagccagtacatcaagtggatcgtctctgcggggcttgcccaggtcagcgagttttcctttgtcctggggagccgggcgcgaagagcgggcgtcatctctcgggaggtgtacctccttatactgagtgtgaccacgctcagcctcttgctcgccccggtgctgtggagagctgcaatcacgaggtgtgtgcccagaccggagagacggtccagcctctga

SEQ ID NO: 167 - DNA, 4338 bp, Homo sapiens
  source 1..4338: mol_type = unassigned DNA
atggaggagggccatgggctggacctcacttacatcacggagcgcatcatcgctgtgtccttccctgccggctgctctgaggagtcctacctgcacaacctacaggaggtcacgcgcatgctcaagtccaagcacggggacaactacctggtattaaacctttcagaaaagagatatgaccttacgaagcttaacccaaagatcatggatgtgggctggccagagctccacgcaccgcccctggataagatgtgtaccatatgcaaggcgcaggagtcctggctgaacagcaacctccagcatgtggtcgtcattcactgcaggggcgggaaaggacgcataggagtggtcatatcatcctacatgcatttcaccaacgtctcagccagcgccgaccaggcccttgacaggtttgcaatgaagaagttttatgatgacaaagtttcagctttaatgcagccttcccaaaaacggtatgttcagttcctcagtgggctcctgtccggatcggtgaaaatgaatgcctctcccctgttcctgcattttgtcatcctccacggcacccccaacttcgacacaggtggagtgtgccggccctttctgaagctctaccaagccatgcagcctgtgtacacctccgggatctacaacgttggcccagaaaaccccagcaggatctgcatcgtcatcgagccggcccagcttctgaagggagatgtcatggtgaaatgctaccacaagaaataccgctcggccacccgtgacgtcattttccgcctgcagtttcacactggggctgtgcagggctacgggctggtgtttgggaaggaggatctggacaatgccagcaaagatgaccgttttcctgactatgggaaggttgaattagtcttctctgccacgcctgagaagattcaagggtccgaacacttgtacaacgaccacggtgtgattgtggactacaacacaacagacccactgatacgctgggactcgtacgagaacctcagtgcagatggagaagtgctacacacgcagggccctgtcgatggcagcctttacgcgaaggtgaggaagaaaagctcctcggatcctggcatcccaggtggcccccaggcaatcccggccaccaacagcccagaccacagtgaccacaccttgtctgtcagcagtgactccggccactctacagcctctgccaggacggataagacggaagagcgcctggccccaggaaccaggaggggcctgagtgcccaggagaaggcagagttggaccagctgctcagtggctttggcctggaagatcctggaagctccctcaaggaaatgactgatgctcgaagcaagtacagtgggacccgccacgtggtgccagcccaggttcacgtgaatggagacgctgctctgaaggatcgggagacagacattctggatgacgagatgccccaccacgacctgcacagtgtggacagccttgggaccctgtcctcctcggaagggcctcagtcggcccacctgggtcccttcacctgccacaagagcagccagaactcactcctatctgacggttttggcagcaacgttggtgaagatccgcagggcaccctcgttccggacctgggccttggcatggacggcccctatgagcgggagcggacttttgggagtcgagagcccaagcagccccagcccctgctgagaaagccctcagtgtccgcccagatgcaggcctatgggcagagcagctactccacacagacctgggtgcgccagcagcagatggttgtagctcaccagtatagcttcgccccagatggggaggcccggctggtgagccgctgccctgcagacaatcctggcctcgtccaggcccagcccagagtgccactcacccccacccgagggaccagcagtagggtggctgtccagaggggtgtaggcagtgggccacatccccctgacacacagcagccctctcccagcaaagcgttcaaacccaggtttccaggagaccaggttgtgaatggagccggcccagagctgagcacaggcccctccccaggctcgcccaccctggacatcgaccagtccatcgagcagctcaacaggctgatcctggagctggatcccaccttcgagcccatccctacccacatgaacgccctcggtagccaggccaatggctctgtgtctccagacagcgtgggaggtgggctccgggcaagcagcaggctgcctgacacaggagagggccccagcagggccaccgggcggcaaggctcctctgctgaacagcccctgggcgggagactcaggaagctgagcctggggcagtacgacaacgatgctggggggcagctgcccttctccaaatgtgcatggggaaaggctggtgtggactatgccccaaacctgccgccattcccctcaccagcggacgtcaaagagacgatgacccctggctatccccaggacctcgatattatcgatggcagaattttaagtagcaaggagtccatgtgttcaactccagcatttcctgtgtctccagagacaccgtatgtgaaaacagcgctgcgccatcctccgttcagcccacctgagcccccgctgagcagcccagccagtcagcacaaaggaggacgtgaaccacgaagctgccctgagacgctcactcacgctgtggggatgtcagagagccccatcggacccaaatccacgatgctccgggctgatgcgtcctcgacgccctcctttcagcaggcttttgcttcttcctgcaccatttccagcaacggccctgggcagaggagagagagctcctcttctgcagaacgccagtgggtggagagcagccccaagcccatggtttccctgctggggagcggccggcccaccggaagtcccctcagcgctgagttctccggtaccaggaaggactccccagtgctgtcctgcttcccgccgtcagagctccaggctcctttccacagccatgagctgtccctagcagagccaccggactccctggcgcctcccagcagccaggccttcctgggcttcggcaccgccccagtgggaagtggccttccgcccgaggaggacctgggggccttgctggccaattctcatggagcgtcaccgacccccagcatcccgctgacagcgacaggggctgccgacaatggcttcctgtcccacaactttctcacggtggcgcctggacacagcagccaccacagtccaggcctgcagggccagggtgtgaccctgcccgggcagccacccctccctgagaagaagcgggcctcggagggggatcgttctttgggctcagtctctccctcctccagtggcttctccagcccgcacagcgggagcaccatcagtatccccttcccaaatgtccttcccgacttttccaaggcttcagaagcggcctcacctctgccagatagtccaggtgataaacttgtgatcgtgaaatttgttcaagacacttccaagttctggtacaaggcggatatttcaagagaacaagccatcgccatgttgaaggacaaggagccgggctcattcattgttcgagacagccattccttccgaggggcctatggcctggccatgaaggtggccacgcccccaccttcagtcctgcagctgaacaagaaagctggagatttggccaatgaactcgtccggcactttttgatcgagtgtaccccgaagggagtgcggttgaaagggtgctcgaatgaaccatatttcgggagcctgacggccttggtgtgccagcattccatcacgcccttggccttgccgtgcaagctgcttatcccagagagagatccattggaggaaatagcagaaagttctccccagacggcagccaattcagcagctgagctgttgaagcagggggcagcctgcaatgtgtggtacttgaactctgtggagatggagtccctcaccggccaccaggcgatccagaaggccctgagcatcaccctggtccaggagcctccacctgtgtccacagttgtgcacttcaaggtgtcagcccagggcatcaccctgacagacaatcagaggaagctcttcttccggaggcattaccccgtgaacagtgtgattttctgtgccttggacccacaagacaggaagtggatcaaagatggcccttcctcaaaagtctttggatttgtggcccggaagcagggcagtgccacggataatgtgtgccacctgtttgcagagcatgaccctgagcagcctgccagtgccattgtcaacttcgtatcaaaggtcatgattggttccccaaagaaggtctga

SEQ ID NO: 168 - skipped

SEQ ID NO: 169 - DNA, 3051 bp, Homo sapiens
  source 1..3051: mol_type = unassigned DNA
atggaggtggcggtggagaaggcggtggcggcggcggcagcggcctcggctgcggcctccggggggccctcggcggcgccgagcggggagaacgaggccgagagtcggcagggcccggactcggagcgcggcggcgaggcggcccggctcaacctgttggacacttgcgccgtgtgccaccagaacatccagagccgggcgcccaagctgctgccctgcctgcactctttctgccagcgctgcctgcccgcgccccagcgctacctcatgctgcccgcgcccatgctgggctcggccgagaccccgccacccgtccctgcccccggctcgccggtcagcggctcgtcgccgttcgccacccaagttggagtcattcgttgcccagtttgcagccaagaatgtgcagagagacacatcatagataacttttttgtgaaggacactactgaggttcccagcagtacagtagaaaagtcaaatcaggtatgtacaagctgtgaggacaacgcagaagccaatgggttttgtgtagagtgtgttgaatggctctgcaagacgtgtatcagagctcatcagagggtaaagttcacaaaagaccacactgtcagacagaaagaggaagtatctccagaggcagttggtgtcaccagccagcgaccagtgttttgtccttttcataaaaaggagcagctgaagctgtactgtgagacatgtgacaaactgacatgtcgagactgtcagttgttagaacataaagagcatagataccaatttatagaagaagcttttcagaatcagaaagtgatcatagatacactaatcaccaaactgatggaaaaaacaaaatacataaaattcacaggaaatcagatccaaaacagaattattgaagtaaatcaaaatcaaaagcaggtggaacaggatattaaagttgctatatttacactgatggtagaaataaataaaaaaggaaaagctctactgcatcagttagagagccttgcaaaggaccatcgcatgaaacttatgcaacaacaacaggaagtggctggactctctaaacaattggagcatgtcatgcatttttctaaatgggcagtttccagtggcagcagtacagcattactttatagcaaacgactgattacataccggttacggcacctccttcgtgcaaggtgtgatgcatccccagtgaccaacaacaccatccaatttcactgtgatcctagtttctgggctcaaaatatcatcaacttaggttctttagtaatcgaggataaagagagccagccacaaatgcctaagcagaatcctgtcgtggaacagaattcacagccaccaagtggtttatcatcaaaccagttatccaagttcccaacacagatcagcctagctcaattacggctccagcatatgcagcaacagcaaccgcctccacgtttgataaactttcagaatcacagccccaaacccaatggaccagttcttcctcctcatcctcaacaactgagatatccaccaaaccagaacataccacgacaagcaataaagccaaaccccctacagatggctttcttggctcaacaagccataaaacagtggcagatcagcagtggacagggaaccccatcaactaccaacagcacatcctctactccttccagccccacgattactagtgcagcaggatatgatggaaaggcttttggttcacctatgatcgatttgagctcaccagtgggagggtcttataatcttccctctcttccggatattgactgttcaagtactattatgctggacaatattgtgaggaaagatactaatatagatcatggccagccaagaccaccctcaaacagaacggtccagtcaccaaattcatcagtgccatctccaggccttgcaggacctgttactatgactagtgtacaccccccaatacgttcacctagtgcctccagcgttggaagccgaggaagctctggctcttccagcaaaccagcaggagctgactctacacacaaagtcccagtggtcatgctggagccaattcgaataaaacaagaaaacagtggaccaccggaaaattatgatttccctgttgttatagtgaagcaagaatcagatgaagaatctaggcctcaaaatgccaattatccaagaagcatactcacctccctgctcttaaatagcagtcagagctctacttctgaggagactgtgctaagatcagatgcccctgatagtacaggagatcaacctggacttcaccaggacaattcctcaaatggaaagtctgaatggttggatccttcccagaagtcacctcttcatgttggagagacaaggaaagaggatgaccccaatgaggactggtgtgcagtttgtcaaaacggaggggaactcctctgctgtgaaaagtgccccaaagtattccatctttcttgtcatgtgcccacattgacaaattttccaagtggagagtggatttgcactttctgccgagacttatctaaaccagaagttgaatatgattgtgatgctcccagtcacaactcagaaaaaaagaaaactgaaggccttgttaagttaacacctatagataaaaggaagtgtgagcgcctacttttatttctttactgccatgaaatgagcctggcttttcaagaccctgttcctctaactgtgcctgattattacaaaataattaaaaatccaatggatttgtcaaccatcaagaaaagactacaagaagattattccatgtactcaaaacctgaagattttgtagctgattttagattgatctttcaaaactgtgctgaattcaatgagcctgattcagaagtagccaatgctggtataaaacttgaaaattattttgaagaacttctaaagaacctctatccagaaaaaaggtttcccaaaccagaattcaggaatgaatcagaagataataaatttagtgatgattcagatgatgactttgtacagccccggaagaaacgcctcaaaagcattgaagaacgccagttgcttaaataa

SEQ ID NO: 170 - DNA, 7446 bp, Homo sapiens
  source 1..7446: mol_type = unassigned DNA
atggagcagtcgccgccgccggcgcccgagccgacccaagggccgacccccgcaaggagccgaaggcggcgggagccagagtcgccgccggcgtcggcgccgattcctctctttggtgctgacactattggccagagaagtcctgatggaccggtactgagcaaagctgaatttgttgagaaagttcgtcagagtaatcaggcctgtcatgatggagatttccacacagctattgttctgtataatgaagccctggctgttgaccctcagaactgcatcttatacagcaatagatctgcagcctacatgaaaatccagcagtatgacaaggcactggatgatgcaatcaaagctcgacttctcaatcccaagtggccaaaggcatacttccgacagggtgttgccctccagtaccttggacgtcatgccgatgccctggcagcctttgcatctggactggctcaagaccccaagagtctccagcttctggtggggatggtggaagccgccatgaaatctcccatgagagactccctcgagcccacttatcagcagcttcagaaaatgaaactggacaagagtccctttgtggtcgtgtctgtggttgggcaggaactcctgacagctggccatcatggggcctctgtggttgtcttagaagccgcactgaagattggcacctgcagcctcaaactgagaggttctgttttctctgccctgagcagtgcttactggtctcttggaaatacagagaagagcaccggatatatgcagcaggacttggatgtagccaagaccttaggtgaccagacaggagaatgccgagctcatgggaatctgggctctgcattcttctccaaaggaaattaccgggaggctctcactaaccacaggcatcagttggtactcgccatgaaactcaaagatcgagaggcagcttcatcagccttgagcagtctgggccacgtgtacacagccattggagactaccccaatgcactggccagtcacaaacagtgtgttcttcttgccaagcaatccaaagatgaactttctgaagcccgagaacttggcaacatgggagctgtgtatattgccatgggtgactttgagaatgctgtgcagtgccatgagcagcatctgaagatagccaaggacctggggaacaagcgagaagaggcccgggcttatagcaacctgggcagtgcctatcactaccggaggaactttgacaaggccatgtcttaccataactatgtcctggagctggcacaggagttgatggagaaggctattgagatgcgggcctatgctggactaggccatgctgccaggtgcatgcaggatttggagagagctaaacaataccatgagcagcagctgggcattgctgaggatctcaaggaccgggctgcagaggggcgagcatcctccaatctaggaatcatacaccagatgaaaggtgattatgacactgcactgaaactccacaagacccacctgtgcattgcccaggagctgagtgattatgctgcccagggccgtgcctatgggaatatgggcaatgcctacaatgccctgggcatgtacgaccaggcggtcaaataccatcggcaggagctgcagatctccatggaagtgaatgaccgcgcctcacaggcctccacacatgggaaccttgccgtggcctaccaggccctgggtgcccatgaccgggccctgcaacactatcagaaccacttgaacatcgcccgggagctacgagacatccagagcgaggcccgggccctcagcaacctgggcaatttccactgctctcggggagagtatgtccaggctgccccctattatgaacagtacctccggcttgctcccgaccttcaagacatggaaggagaagggaaggtctgccacaatcttggctatgcccattactgccttggaaactatcaggaggcagtgaagtactacgaacaggatctggcactggctaaagaccttcacgacaagttgagccaagcaaaagcctactgcaacttgggcctagcattcaaggctctgctgaatttcagtaaagctgaagagtgtcagaagtacctactgtccctagcccagtctctgaataattcccaggctaaatttcgagccctaggaaacctgggcgatatattcatctgtaaaaaagatataaatggtgcaataaaattctatgagcagcaactgggcttagctcaccaggtaaaggacagaagattagaagccagtgcatatgcagccctgggcactgcataccgaatgatccagaagtatgacaaggccctgggttatcacacacaggaactggaggtatatcaggagctgagtgacttgccaggggagtgcagagctcatgggcacctggctgctgtctacatggcccttgggaaatacacaatggcattcaagtgttatgaagagcaactggatctagggcaaaagctgaaggatccgagtctggaagcccaggtctatggcaacatgggcatcacaaagatgaacatgaatgtgatggaagaagccattggctactttgagcagcaattggccatgctgcagcagctaagtggaaatgagtctgtgctcgacaggggccgggcctatggcaacctgggggattgctacgaagccctgggtgactatgaggaagctatcaaatactatgaacaatatttatctgtcgcgcagagtctgaatcgcatgcaagaccaagccaaggcttaccggggcctgggaaatggacacagggcaatggggagcttgcagcaagcccttgtgtgctttgaaaagaggctcgtggttgctcatgaacttggagaggccttcaataaagcccaggcctatggagagctgggaagtctgcacagccaattagggaattacgaacaagccatttcctgccttgaacgccagctgaacattgctagagatatgaaagaccgagccctggagagtgacgcagcctgtggcctggggggcgtttaccagcagatgggggagtatgacacagccctgcagtaccaccagcttgatctacagatagcagaggaaaccaacaaccccacgtgccagggccgagcctatgggaacctgggcctgacttatgaatccctgggcaccttcgagagggctgtggtctatcaagaacagcacttgagcattgctgcacagatgaatgacttggcggccaagacggtgtcatatagtagccttggaaggacccatcatgccttgcagaactattcccaagcagtcatgtacttacaggaaggtttaaggttagctgagcaactgggccgaagagaagatgaggcaaaaattcgccatggccttggcctctccctttgggctagtggaaacttggaggaggcccaacaccagctttatagggcatcagccttgtttgaaacaatccgacatgaggcacagctgagcacggactacaaactctccctctttgacctgcagacatcatcctaccaggccttgcagcgggtgctcgtcagcctaggccatcatgatgaagccctggctgtggcagaaaggggacggacaagggcatttgctgatcttctggtggaacgacaaacaggacaacaagactccgacccctactccccagtcactattgatcagatcttagagatggtaaatggccagaggggactagtgctttactattccctggctgcaggctatctgtatagctggctgctggctcctggggcaggaattgtgaagtttcatgaacactacctgggtgagaacacagtggaaaactcaagtgacttccaggccagcagcagtgtaacccttccaacagcaaccggctcagccctggagcagcacattgccagtgtccgggaggccctgggggtggagtctcactactcaagggcctgtgccagcagtgagacagagagtgaagcgggagacatcatggaccagcaatttgaagagatgaacaacaaactcaactcggtcactgaccccactggctttctgcggatggttcgccgcaataacctgtttaacaggagctgccagagcatgacgagcctgttcagtaacactgtgtcaccgacccaggacgggacctcctctcttcccaggaggcagagctcgtttgccaagcccccgctccgtgccctgtatgacctgctcatcgcgcccatggaagggggcctgatgcactccagcggccccgtgggccggcaccggcagctcatcctggttctggagggggagctctacctcattcctttcgccctcctgaagggaagctcctccaatgagtacctctacgagcgcttcggcctccttgctgtcccttccatccgctccctcagcgtgcagtccaagtctcacttacggaagaacccgcccacatactccagctccacatccatggcggctgtcatcggcaaccccaagctaccatcggccgtgatggacaggtggctgtgggggcccatgccatcggccgaggaagaggcctacatggtgtccgagctgctgggctgccagcccctagtgggcagtgtggccaccaaggagagggtcatgagtgccctgacccaggctgaatgcgtccactttgccacccacatctcctggaagctgtcggccttggtcctcacgcccagcatggacggcaaccctgccagcagcaagagctccttcggccacccctacacgatccctgagtccttgcgggtgcaggacgatgccagtgatggggagagcatctcggactgcccgcccctgcaggagctgctgcttactgccgccgacgtcctggacctgcagctgcctgtgaagctggtggtgcttggctcctcccaggagtccaacagcaaagtcacagccgacggggtcatcgcgctgacaagggccttcctggctgccggcgctcagtgtgtcctcgtgtctctgtggcctgtgccagtggctgcttctaagatgttcatccatgccttctactcatccctgctgaacggcctgaaagccagcgccgccctgggggaggccatgaaggtggtgcagagcagcaaggccttctcgcacccctccaactgggcagggttcatgctcatcgggagtgacgttaagctgaacagcccctcatcactcatcggccaggccctcacagagatcctgcagcacccggagcgtgcgcgggacgccctgcgagtgctgctgcacctggtggagaaatccctgcagcgcatccagaatgggcagcgcaatgccatgtacacatcccagcagagtgtggagaacaaagtgggcggcatccctggctggcaggccctcctcaccgctgtgggcttccggctggaccccccaaccagtggcctgccagcggctgtcttcttcccaacctccgacccgggcgaccggctccagcagtgcagcagcacactccagtccctgctgggtctgcccaatcctgccctccaagccctttgcaaactcatcactgcctccgagacgggcgagcagctcatcagccgggctgttaaaaatatggttggaatgctccaccaggtgctggttcagctccaggctggcgagaaggagcaggacttggcatcagctcccattcaggtctccatcagcgtccagctgtggcggctcccgggatgccacgagttcctggcagctctaggttttgatctctgtgaagttggtcaggaggaagtaatcctgaaaaccgggaagcaagctaatcgacggactgtgcacttcgcgctccagtccctgctgtctctgtttgattctactgagctacccaagcgcctcagccttgacagctcctcctccctcgagtctcttgcttctgctcagtctgtttccaacgccctgcccttgggttaccagcaaccccccttctctcccaccggtgcggacagcatcgcctcagatgccatctctgtgtacagtctgagctccattgcctcctcaatgagctttgtctccaaacccgagggtggatcagagggtggaggccccggaggacggcaggaccatgaccggtccaagaacgcttacctgcagagatccaccctgcctaggagccagctgcctccccagacccgccctgcaggcaacaaagatgaagaagaatatgaagggttttctatcatcagtaacgagcccttggcgacctaccaagaaaaccgaaacacatgcttctcaccagaccacaaacaaccccaacctgggacagccggaggcatgagagtctcggtgagctccaaagggagcatcagcactccaaattctccagtgaaaatgactctgattcccagccccaactcacccttccaaaaggtgggaaaactagcaagctcagatacaggagaatcagaccagtctagcacagaaacggacagtaccgtgaaatcccaagaagaaagcaacccaaaactggatccacaagagttagcccagaaaattctggaggagacacagagtcatctcattgcggtggagcgtcttcagaggagcggcggccaggtgagcaagagtaataaccctgaagacggcgttcaggcgcccagcagcactgctgtcttcagagcgtcagaaaccagtgcgttcagcaggcctgttctctcccatcagaagagtcagccatcaccagtcactgttaaaccaaagcccccagccaggagctcctccctgcccaaggtgagttccggatatagcagccccaccacctcagagatgtccatcaaagacagcccgagccagcacagtggccggccatcgcccggctgcgactcacagacttcccagctggaccagcctctctttaaactgaagtaccccagctctccttacagcgctcacatttccaaatcaccaaggaacatgtccccaagctccggccaccagtctcctgctggcagtgcaccctccccagctctctcctactcctcagctggatctgctcgctcaagtccagcagacgctcccgacatagacaaactgaaaatggcagccattgatgaaaaggtgcaggctgtccataacctgaagatgttctggcagagcacaccccagcattccacagggccaatgaagatcttccggggggctcctggcacgatgacttccaaaagggatgtcctcagtctgttgaatttgtcaccacggcacaataagaaggaggagggagtggataagcttgaactgaaggagctgtccctgcagcagcatgacggagctccaccgaaagcccctcccaacggacactggcgcaccgagaccacctcgctgggctcactgccgctgcccgccggccctcccgccacagcccccgcgcgccctttgaggcttccttctggaaatggctacaagttcctgtctccaggaagatttttcccttcttccaaatgctaa

SEQ ID NO: 171 - skipped

SEQ ID NO: 172 - DNA, 465 bp, Homo sapiens
  source 1..465: mol_type = unassigned DNA
atggcggccagcaggaggctgatgaaggagcttgaagaaatccgcaaatgtgggatgaaaaacttccgtaacatccaggttgatgaagctaatttattgacttggcaagggcttattgttcctgacaaccctccatatgataagggagccttcagaatcgaaatcaactttccagcagagtacccattcaaaccaccgaagatcacatttaaaacaaagatctatcacccaaacatcgacgaaaaggggcaggtctgtctgccagtaattagtgccgaaaactggaagccagcaaccaaaaccgaccaagtaatccagtccctcatagcactggtgaatgacccccagcctgagcacccgcttcgggctgacctagctgaagaatactctaaggaccgtaaaaaattctgtaagaatgctgaagagtttacaaagaaatatggggaaaagcgacctgtggactaa

SEQ ID NO: 173 - DNA, 3207 bp, Homo sapiens
  source 1..3207: mol_type = unassigned DNA
atgttcaccctgtctcagacctcgagagcatggttcatcgatagagcccgtcaggcacgagaagaaaggcttgtgcagaaggaacgggagcgggcagctgttgtgatccaggcccatgtccggagttttctctgtcggagtcgactgcagagagatatcaggagagagattgatgacttttttaaagcagatgaccctgagtccactaaaagaagtgcactttgtattttcaagattgccaggaaactgctgttcctattcagaatcaaagaggataatgagagatttgagaagttgtgtcgcagcatcctgagcagcatggatgctgagaatgagcctaaggtgtggtatgtgtccctggcttgttctaaggacctcaccctcctttggattcaacagatcaagaacattttgtggtactgctgtgattttctcaagcagctcaagcctgaaatcctgcaggactcccgactcatcaccctgtacctcacgatgcttgtcaccttcacagacacttcaacgtggaaaattcttcggggaaaaggtgaaagtcttcgaccagcgatgaaccacatttgtgcaaatataatgggacatctcaaccagcatggattttattctgtgctgcagatattgttaacccgtggcctggcaagaccccgtccttgtctatccaaaggcactttaacagcagctttttctctagcgttacgccctgtgattgctgcacagttctcagacaatctgattcggccgttcctcatccacatcatgtctgtgcctgctctggtgactcatctcagcacagtgacccctgagcgcctcactgttttagaatcccatgacatgcttcgtaaattcatcatatttttaagagaccaagatcgatgccgtgatgtatgtgaaagtttagaaggatgccatacgctttgtctaatgggcaacctcctacacttgggctccctcagccccagagtgttagaggaggagacagatgggttcgtgagtttgctcacccagacgctgtgctactgtcggaagtatgtgtctcagaagaagtccaacctgacccactggcatcctgtccttggctggttctcccaatctgtggattatggccttaacgagtcaatgcacttgatcaccaaacagctgcagttcttgtggggggtgcctctgatccggatcttcttctgtgacatcctgagcaagaagctactggagagccaggagccagcccacgcacagccagcatcccctcagaatgtgctcccagtgaagagtctcctaaagcgtgcttttcaaaagtcggcatcagtccggaatattctcaggcctgtcgggggtaaacgggtcgactctgcagaagtccagaaggtttgcaacatctgtgtcctctaccagacctcgctgacaactctcacacagattcggctgcagatactcacaggtctcacttaccttgatgacctgcttcccaaactgtgggcatttatctgtgagctcgggccccacggagggttaaagctcttcttggaatgcctgaacaatgacactgaagagtccaagcaactcttggccatgctgatgctgttctgtgactgttcgcggcacctcatcacaatccttgatgacattgaagtttatgaagaacagatttcattcaaactggaagagctggtcactatctcctctttcctgaattcttttgtgtttaagatgatctgggatggaattgtagagaacgccaagggtgagaccttggagctgttccagtctgtccacgggtggcttatggtgctgtacgagcgggactgccggcggcgcttcacccccgaggaccactggctgcgaaaggatctcaaacctagcgtgctcttccaagaactcgacagggacagaaaacgggcacagttgatcctgcagtacatcccacatgtcatccctcacaaaaacagagttctactgtttcgaaccatggttaccaaggagaaggagaaactggggctggtggaaaccagctctgcctccccgcatgtcactcacatcaccatccgccggtccaggatgctggaggacggctacgagcagcttaggcagctctcccagcacgccatgaagggggtcatccgtgtgaagtttgtcaatgacctcggggtggacgaagcagggattgatcaagacggtgtttttaaggagttcttggaagagatcatcaagagagtttttgacccagcactcaatctgttcaagacaaccagtggggatgagaggctgtacccctcacccacatcctacatccatgagaattacctgcagctcttcgagtttgtggggaagatgctggggaaggctgtgtatgagggaattgtggtggacgtgccatttgcatccttcttcctgagccaactgcttgggcaccaccacagcgtcttctatagctcggtggatgaactgccttctctggactccgagttctataaaaacctcacctccatcaagcgctatgatggggacatcactgacctgggcctgacgctgtcttacgacgaggacgtcatgggtcagcttgtttgccatgaactgattcctggagggaagaccattcctgttacaaatgaaaataaaattagctacatccatctgatggcacattttcgaatgcacactcaaataaaaaaccaaacagctgccctcattagcggattccgttccattatcaaacccgagtggatccgaatgttctcaactcctgaactgcagcgtctcatctctggcgacaatgctgagattgatctggaagatttaaagaagcacacagtctactacggtggtttccatggaagtcacagagtcatcatctggctctgggatattctggcctccgacttcacaccggatgagagagctatgtttctgaagttcgtgaccagctgctccagacccccgctcctgggattcgcctacctcaagcctccattctccatccgctgcgtggaggtgtcggacgatcaggacaccggggacactctgggcagcgtcctccggggcttcttcaccatccgcaagcgggagccaggcggccgcctgcccacctcctccacctgcttcaacctgctcaagctgcccaactacagcaagaagagcgtcctccgcgagaagctgcgctacgccatcagcatgaacacgggctttgaactctcctag

SEQ ID NO: 174 - DNA, 10302 bp, Homo sapiens
  source 1..10302: mol_type = unassigned DNA
atggccaagtatggagaacatgaagccagtcctgacaatgggcagaacgaattcagtgatatcattaagtccagatctgatgaacacaatgacgtacagaagaaaacctttaccaaatggataaatgctcgattttcaaagagtgggaaaccacccatcaatgatatgttcacagacctcaaagatggaaggaagctattggatcttctagaaggcctcacaggaacatcactgccaaaggaacgtggttccacaagggtacatgccttaaataacgtcaacagagtgctgcaggttttacatcagaacaatgtggaattagtgaatatagggggaactgacattgtggatggaaatcacaaactgactttggggttactttggagcatcattttgcactggcaggtgaaagatgtcatgaaggatgtcatgtcggacctgcagcagacgaacagtgagaagatcctgctcagctgggtgcgtcagaccaccaggccctacagccaagtcaacgtcctcaacttcaccaccagctggacagatggactcgcctttaatgctgtcctccaccgacataaacctgatctcttcagctgggataaagttgtcaaaatgtcaccaattgagagacttgaacatgccttcagcaaggctcaaacttatttgggaattgaaaagctgttagatcctgaagatgttgccgttcagcttcctgacaagaaatccataattatgtatttaacatctttgtttgaggtgctacctcagcaagtcaccatagacgccatccgtgaggtagagacactcccaaggaaatataaaaaagaatgtgaagaagaggcaattaatatacagagtacagcgcctgaggaggagcatgagagtccccgagctgaaactcccagcactgtcactgaggttgacatggatctggacagctatcagattgcgttggaggaagtgctgacctggttgctttctgctgaggacactttccaggagcaggatgatatttctgatgatgttgaagaagtcaaagaccagtttgcaacccatgaagcttttatgatggaactgactgcacaccagagcagtgtgggcagcgtcctgcaggcaggcaaccaactgataacacaaggaactctgtcagacgaagaagaatttgagattcaggaacagatgaccctgctgaatgctagatgggaggctcttagggtggagagtatggacagacagtcccggctgcacgatgtgctgatggaactgcagaagaagcaactgcagcagctctccgcctggttaacactcacagaggagcgcattcagaagatggaaacttgccccctggatgatgatgtaaaatctctacaaaagctgctagaagaacataaaagtttgcaaagtgatcttgaggctgaacaggtgaaagtaaattcactaactcacatggtggtcattgttgatgaaaacagtggtgagagtgctacagctatcctagaagaccagttacagaaacttggtgagcgctggacagcagtatgccgttggactgaagaacgctggaataggttacaagaaatcaatatattgtggcaggaattattggaagaacagtgcttgttgaaagcttggttaaccgaaaaagaagaggctttaaataaagtccagacaagcaacttcaaagaccaaaaggaactaagtgtcagtgttcgacgtctggctattttgaaggaagacatggaaatgaagcgtcaaacattggatcagctgagtgagattggccaggatgtgggacaattacttgataattccaaggcatctaagaagatcaacagtgactcagaggaactgactcaaagatgggattctttggttcagagactagaagattcctccaaccaggtgactcaggctgtagcaaagctggggatgtctcagattcctcagaaggaccttttggagactgttcgtgtaagagaacaagcaattacaaaaaaatctaagcaggaactgcctcctcctcctcccccaaagaagagacagatccatgtggatattgaagctaagaaaaagtttgatgctataagtgcagagctgttgaactggattttgaaatggaaaactgccattcagaccacagagataaaagagtatatgaagatgcaagacacttccgaaatgaaaaagaagttgaaggcattagaaaaagaacagagagaaagaatccccagagcagatgaattaaaccaaactggacaaatccttgtggagcaaatgggaaaagaaggccttcctactgaagaaataaaaaatgttctggagaaggtttcatcagaatggaagaatgtatctcaacatttggaagatctagaaagaaagattcagctacaggaagatataaatgcttatttcaagcagcttgatgagcttgaaaaggtcatcaagacaaaggaggagtgggtaaaacacacttccatttctgaatcttcccggcagtccttgccaagcttgaaggattcctgtcagcgggaattgacaaatcttcttggccttcaccccaaaattgaaatggctcgtgcaagctgctcggccctgatgtctcagccttctgccccagattttgtccagcggggcttcgatagctttctgggccgctaccaagctgtacaagaggctgtagaggatcgtcaacaacatctagagaatgaactgaagggccaacctggacatgcatatctggaaacattgaaaacactgaaagatgtgctaaatgattcagaaaataaggcccaggtgtctctgaatgtccttaatgatcttgccaaggtggagaaggccctgcaagaaaaaaagacccttgatgaaatccttgagaatcagaaacctgcattacataaacttgcagaagaaacaaaggctctggagaaaaatgttcatcctgatgtagaaaaattatataagcaagaatttgatgatgtgcaaggaaagtggaacaagctaaaggtcttggtttccaaagatctacatttgcttgaggaaattgctctcacactcagagcttttgaggccgattcaacagtcattgagaagtggatggatggcgtgaaagacttcttaatgaaacagcaggctgcccaaggagacgacgcaggtctacagaggcagttagaccagtgctctgcatttgttaatgaaatagaaacaattgaatcatctctgaaaaacatgaaggaaatagagactaatcttcgaagtggtccagttgctggaataaaaacttgggtgcagacaagactaggtgactaccaaactcaactggagaaacttagcaaggagatcgctactcaaaaaagtaggttgtctgaaagtcaagaaaaagctgcgaacctgaagaaagacttggcagagatgcaggaatggatgacccaggccgaggaagaatatttggagcgggattttgagtacaagtcaccagaagagcttgagagtgctgtggaagagatgaagagggcaaaagaggatgtgttgcagaaggaggtgagagtgaagattctcaaggacaacatcaagttattagctgccaaggtgccctctggtggccaggagttgacgtctgagctgaatgttgtgctggagaattaccaacttctttgtaatagaattcgaggaaagtgccacacgctagaggaggtctggtcttgttggattgaactgcttcactatttggatcttgaaactacctggttaaacactttggaagagcggatgaagagcacagaggtcctgcctgagaagacggatgctgtcaacgaagccctggagtctctggaatctgttctgcgccacccggcagataatcgcacccagattcgagagcttggccagactctgattgatggggggatcctggatgatataatcagtgagaaactggaggctttcaacagccgatatgaagatctaagtcacctggcagagagcaagcagatttctttggaaaagcaactccaggtgctgcgggaaactgaccagatgcttcaagtcttgcaagagagcttgggggagctggacaaacagctcaccacatacctgactgacaggatagatgctttccaagttccacaggaagctcagaaaatccaagcagagatctcagcccatgagctaaccctagaggagttgagaagaaatatgcgttctcagcccctgacctccccagagagtaggactgccagaggaggaagtcagatggatgtgctacagaggaaactccgagaggtgtccacaaagttccagcttttccagaagccagctaacttcgagcagcgcatgctggactgcaagcgtgtgctggatggcgtgaaagcagaacttcacgttctggatgtgaaggacgtagaccctgacgtcatacagacgcacctggacaagtgtatgaaactgtataaaactttgagtgaagtcaaacttgaagtggaaactgtgattaaaacaggaagacatattgtccagaaacagcaaacggacaacccaaaagggatggatgagcagctgacttccctgaaggttctttacaatgacctgggcgcacaggtgacagaaggaaaacaggatctggaaagagcatcacagttggcccggaaaatgaagaaagaggctgcttctctctctgaatggctttctgctactgaaactgaattggtacagaagtccacttcagaaggtctgcttggtgacttggatacagaaatttcctgggctaaaaatgttctgaaggatctggaaaagagaaaagctgatttaaataccatcacagagagtagtgctgccctgcaaaacttgattgagggcagtgagcctattttagaagagaggctctgcgtccttaacgctgggtggagccgagttcgtacctggactgaagattggtgcaataccttgatgaaccatcagaaccagctagaaatatttgatgggaacgtggctcacataagtacctggctttatcaagctgaagctctattggatgaaattgaaaagaaaccaacaagtaaacaggaagaaattgtgaagcgtttagtatctgagctggatgatgccaacctccaggttgaaaatgtccgcgatcaagcccttattttgatgaatgcccgtggaagctcaagcagggagcttgtagaaccaaagttagctgagctgaataggaactttgaaaaggtgtctcaacatatcaaaagtgccaaattgctaattgctcaggaaccattataccaatgtttggtcaccactgaaacatttgaaactggtgtgcctttctctgacttggaaaaattagaaaatgacatagaaaatatgttaaaatttgtggaaaaacacttggaatccagtgatgaagatgaaaagatggatgaggagagtgcccagattgaggaagttctacaaagaggagaagaaatgttacatcaacctatggaagataataaaaaagaaaagatccgtttgcaattattacttttgcatactagatacaacaaaattaaggcaatccctattcaacagaggaaaatgggtcaacttgcttctggaattagatcatcacttcttcctacagattatctggttgaaattaacaaaattttactttgcatggatgatgttgaattatcgcttaatgttccagagctcaacactgctatttacgaagacttctcttttcaggaagactctctgaagaatatcaaagaccaactggacaaacttggagagcagattgcagtcattcatgaaaaacagccagatgtcatccttgaagcctctggacctgaagccattcagatcagagatacacttactcagctgaatgcaaaatgggacagaattaatagaatgtacagtgatcggaaaggttgttttgacagggcaatggaagaatggagacagttccattgtgaccttaatgacctcacacagtggataacagaggctgaagaattactggttgatacctgtgctccaggtggcagcctggacttagagaaagccaggatacatcagcaggaacttgaggtgggcatcagcagccaccagcccagttttgcagcactaaaccgaactggggatgggattgtgcagaaactctcccaggcagatggaagcttcttgaaagaaaaactggcaggtttaaaccaacgctgggatgcaattgttgcagaagtgaaggataggcagccaaggctaaaaggagaaagtaagcaggtgatgaagtacaggcatcagctagatgagattatctgttggttaacaaaggctgagcatgctatgcaaaagagatcaaccaccgaattgggagaaaacctgcaagaattaagagacttaactcaagaaatggaagtacatgctgaaaaactcaaatggctgaatagaactgaattggagatgctttcagataaaagtctgagtttacctgaaagggataaaatttcagaaagcttaaggactgtaaatatgacatggaataagatttgcagagaggtgcctaccaccctgaaggaatgcatccaggagcccagttctgtttcacagacaaggattgctgctcatcctaatgtccaaaaggtggtgctagtatcatctgcgtcagatattcctgttcagtctcatcgtacttcggaaatttcaattcctgctgatcttgataaaactataacagaactagccgactggctggtattaatcgaccagatgctgaagtccaacattgtcactgttggggatgtagaagagatcaataagaccgtttcccgaatgaaaattacaaaggctgacttagaacagcgccatcctcagctggattatgtttttacattggcacagaatttgaaaaataaagcttccagttcagatatgagaacagcaattacagaaaaattggaaagggtcaagaaccagtgggatggcacccagcatggcgttgagctaagacagcagcagcttgaggacatgattattgacagtcttcagtgggatgaccatagggaggagactgaagaactgatgagaaaatatgaggctcgactctatattcttcagcaagcccgacgggatccactcaccaaacaaatttctgataaccaaatactgcttcaagaactgggtcctggagatggtatcgtcatggcgttcgataacgtcctgcagaaactcctggaggaatatgggagtgatgacacaaggaatgtgaaagaaaccacagagtacttaaaaacatcatggatcaatctcaaacaaagtattgctgacagacagaacgccttggaggctgagtggaggacggtgcaggcctctcgcagagatctggaaaacttcctgaagtggatccaagaagcagagaccacagtgaatgtgcttgtggatgcctctcatcgggagaatgctcttcaggatagtatcttggccagggaactcaaacagcagatgcaggacatccaggcagaaattgatgcccacaatgacatatttaaaagcattgacggaaacaggcagaagatggtaaaagctttgggaaattctgaagaggctactatgcttcaacatcgactggatgatatgaaccaaagatggaatgacttaaaagcaaaatctgctagcatcagggcccatttggaggccagcgctgagaagtggaacaggttgctgatgtccttagaagaactgatcaaatggctgaatatgaaagatgaagagcttaagaaacaaatgcctattggaggagatgttccagccttacagctccagtatgaccattgtaaggccctgagacgggagttaaaggagaaagaatattctgtcctgaatgctgtcgaccaggcccgagttttcttggctgatcagccaattgaggcccctgaagagccaagaagaaacctacaatcaaaaacagaattaactcctgaggagagagcccaaaagattgccaaagccatgcgcaaacagtcttctgaagtcaaagaaaaatgggaaagtctaaatgctgtaactagcaattggcaaaagcaagtggacaaggcattggagaaactcagagacctgcagggagctatggatgacctggacgctgacatgaaggaggcagagtccgtgcggaatggctggaagcccgtgggagacttactcattgactcgctgcaggatcacattgaaaaaatcatggcatttagagaagaaattgcaccaatcaactttaaagttaaaacggtgaatgatttatccagtcagctgtctccacttgacctgcatccctctctaaagatgtctcgccagctagatgaccttaatatgcgatggaaacttttacaggtttctgtggatgatcgccttaaacagcttcaggaagcccacagagattttggaccatcctctcagcattttctctctacgtcagtccagctgccgtggcaaagatccatttcacataataaagtgccctattacatcaaccatcaaacacagaccacctgttgggaccatcctaaaatgaccgaactctttcaatcccttgctgacctgaataatgtacgtttttctgcctaccgtacagcaatcaaaatccgaagactacaaaaagcactatgtttggatctcttagagttgagtacaacaaatgaaattttcaaacagcacaagttgaaccaaaatgaccagctcctcagtgttccagatgtcatcaactgtctgacaacaacttatgatggacttgagcaaatgcataaggacctggtcaacgttccactctgtgttgatatgtgtctcaattggttgctcaatgtctatgacacgggtcgaactggaaaaattagagtgcagagtctgaagattggattaatgtctctctccaaaggtctcttggaagaaaaatacagatatctctttaaggaagttgcagggccaacagaaatgtgtgaccagaggcagctgggcctgttacttcatgatgccatccagatcccccggcagctaggtgaagtagcagcttttggaggcagtaatattgagcctagtgttcgcagctgcttccaacagaataacaataaaccagaaataagtgtgaaagagtttatagattggatgcatttggaaccacagtccatggtttggctcccagttttacatcgagtggcagcagcggagactgcaaaacatcaggccaaatgcaacatctgtaaagaatgtccaattgtcgggttcaggtatagaagccttaagcattttaactatgatgtctgccagagttgtttcttttcgggtcgaacagcaaaaggtcacaaattacattacccaatggtggaatattgtatacctacaacatctggggaagatgtacgagacttcacaaaggtacttaagaacaagttcaggtcgaagaagtactttgccaaacaccctcgacttggttacctgcctgtccagacagttcttgaaggtgacaacttagagactcctatcacactcatcagtatgtggccagagcactatgacccctcacaatctcctcaactgtttcatgatgacacccattcaagaatagaacaatatgccacacgactggcccagatggaaaggactaatgggtcttttctcactgatagcagctccaccacaggaagtgtggaagacgagcacgccctcatccagcagtattgccaaacactcggaggagagtccccagtgagccagccgcagagcccagctcagatcctgaagtcagtagagagggaagaacgtggagaactggagaggatcattgctgacctggaggaagaacaaagaaatctacaggtggagtatgagcagctgaaggaccagcacctccgaagggggctccctgtcggttcaccgccagagtcgattatatctccccatcacacgtctgaggattcagaacttatagcagaagcaaaactcctcaggcagcacaaaggtcggctggaggctaggatgcagattttagaagatcacaataaacagctggagtctcagctccaccgcctccgacagctgctggagcagcctgaatctgattcccgaatcaatggtgtttccccatgggcttctcctcagcattctgcactgagctactcgcttgatccagatgcctccggcccacagttccaccaggcagcgggagaggacctgctggccccaccgcacgacaccagcacggatctcacggaggtcatggagcagattcacagcacgtttccatcttgctgcccaaatgttcccagcaggccacaggcaatgtga

SEQ ID NO: 175 - DNA, 1143 bp, Homo sapiens
  source 1..1143: mol_type = unassigned DNA
atgagcgagacggtcatctgttccagccgggccactgtgatgctttatgatgatggcaacaagcgatggctccctgctggcacgggtccccaggccttcagccgcgtccagatctaccacaaccccacggccaattcctttcgcgtcgtgggccggaagatgcagcccgaccagcaggtggtcatcaactgtgccatcgtccggggtgtcaagtataaccaggccacccccaacttccatcagtggcgcgacgctcgccaggtctggggcctcaacttcggcagcaaggaggatgcggcccagtttgccgccggcatggccagtgccctagaggcgttggaaggaggtgggccccctccacccccagcacttcccacctggtcggtcccgaacggcccctccccggaggaggtggagcagcagaaaaggcagcagcccggcccgtcggagcacatagagcgccgggtctccaatgcaggaggcccacctgctccccccgctgggggtccacccccaccaccaggacctccccctcctccaggtccccccccacccccaggtttgcccccttcgggggtcccagctgcagcgcacggagcagggggaggaccaccccctgcaccccctctcccggcagcacagggccctggtggtgggggagctggggccccaggcctggccgcagctattgctggagccaaactcaggaaagtcagcaagcaggaggaggcctcaggggggcccacagcccccaaagctgagagtggtcgaagcggaggtgggggactcatggaagagatgaacgccatgctggcccggagaaggaaagccacgcaagttggggagaaaacccccaaggatgaatctgccaatcaggaggagccagaggccagagtcccggcccagagtgaatctgtgcggagaccctgggagaagaacagcacaaccttgccaaggatgaagtcgtcttcttcggtgaccacttccgagacccaaccctgcacgcccagctccagtgattactcggacctacagagggtgaaacaggagcttctggaagaggtgaagaaggaattgcagaaagtgaaagaggaaatcattgaagccttcgtccaggagctgaggaagcggggttctccctga

SEQ ID NO: 176 - DNA, 1074 bp, Homo sapiens
  source 1..1074: mol_type = unassigned DNA
atgtcggccttcgagaagcctcagatcatcgcccatatccagaagggcttcaactacacggtgtttgactgtaagtgggtgccctgcagcgccaaatttgtgaccatgggcaacttcgcacggggcaccggcgtcattcagctgtacgagatccagcacggggacctgaagctgcttcgggagattgaaaaggccaaacctattaaatgtggaacatttggtgcaacatctttacagcagagatatttagctactggagattttggtggaaaccttcatatatggaatttagaagctccagagatgccagtatattctgtaaagggccataaagaaattataaatgccatagatggcataggtggactaggaattggagaaggagcacctgaaattgtgactggcagccgagatggaactgtgaaggtgtgggacccaaggcaaaaagatgatcctgttgctaatatggaacctgtacaaggagaaaacaagagagactgttggactgtggcatttggcaatgcttataatcaagaagaacgtgttgtttgtgctggctatgacaatggggatatcaaactatttgatctcagaaatatggcattacggtgggagacaaacatcaaaaatggggtgtgtagcttggagtttgacagaaaagacataagtatgaataagttagtagccacatctctggaaggaaagttccatgtttttgacatgagaacacagcatccaaccaaaggttttgcctctgtttcagaaaaggctcataaatctactgtgtggcaggtccgacacctgccgcagaacagggagctctttctgacagctggaggcgccggcggccttcacctctggaagtatgaataccctattcagcggtcaaagaaagattctgagggaatagaaatgggagtcgcaggttctgtaagccttctgcagaatgttacgttgtccacccagcccatttcaagtttggattggagtccagataaaaggggtctctgcgtctgtagttcatttgaccaaacggtgagagtactgatcgttacaaagctcaataaaatttga

SEQ ID NO: 177 - DNA, 366 bp, Homo sapiens
  source 1..366: mol_type = unassigned DNA
atgggcagaattttccttgatcatatcggtggtacccgtctgttttcttgtgcaaactgtgatacgatcctgaccaaccgctcagaactcatctccactcgtttcacaggcgccactggcagagcatttctttttaacaaggtagttaacctgcagtacagtgaagttcaagatcgggtcatgctcactggccgccacatggttcgagatgtgagctgcaaaaactgcaatagcaaactgggatggatctatgagtttgccactgaagacagccagcgatataaggaaggccgcgtgatcctggaacgtgctctagttcgagagagtgagggctttgaggagcatgtaccatctgataactcttga

SEQ ID NO: 178 - DNA, 1353 bp, Homo sapiens
  source 1..1353: mol_type = unassigned DNA
atgccatcccctctgggtcccccatgcctgcccgtcatggacccagagaccacccttgaggagcctgagactgcccgcctccgcttccgagggttctgctaccaggaggtggcaggtccccgagaagccctggcccggctgcgtgagctgtgttgccagtggctgcagcctgaggcacactccaaggagcagatgctggagatgctggtgctggagcagttcctgggcacactgcctcccgagatccaggcctgggtgcgcggtcagcggccaggcagtcctgaggaggccgctgccctagtcgaaggactgcagcatgaccctgggcaactgttgggctggatcacagcccatgtcctgaagcaggaggtgctccctgcagcccagaagacagaggaaccacttgggagcccccacccctcagggacagtggagtcccctggggaaggtccccaggacaccagaatagaggggtctgtccagctcagctgcagtgtgaaggaggagcccaatgtcgatggacaggaagtggcaccctccagccctccacttgcagcacagtcccctgaggggaaccatggacaccaagaaccagcctccacatccttccacccacccaggattcaggaggagtgggggctgctggaccggtcacagaaggaactgtactgggatgcgatgctggagaagtacggcacagtggtctccctggggttaccgccccaccagccagaggcacaggcccagtcagagctggggatgctgctcacggggacaggcgtctgcagaagcctgcgctcgggaaatgagagtgagggtccacctggctgcccagaggcccagccgccccagggcccagggccggcagcctgggagggcttgtctggggctgccactcctgcccccactgtgcgcccagggacaccgccagtgcccactcagcccacacctgcagagacgagactggagccggctgccacccccaggaagccctacacgtgcgagcagtgtggccgcggcttcgactggaagtcagtgttcgtcatccaccaccggacacacacgagtgggccaggtgtgcagtccccggggctagccaccggggaaagcacagagaagccaccacaaggggaggtggcctttccgcaccacccccgacgctcactcacaggcccccggagttacccgtgtgaggagtgcgggtgcagcttcagctggaagtcgcagctggtcatccaccgcaagagccacacaggccagcggcgtcacttctgcagtgactgtggccgcgccttcgactggaagtcgcagctggtcatccaccgcaagggccaccggccggaggttccatga

SEQ ID NO: 179 - DNA, 1569 bp, Homo sapiens
  source 1..1569: mol_type = unassigned DNA
atggctgtcagccacctgccaaccatggtccaggaatcggtgaccttcaaggatgtggctatactgttcacccaggaagagtgggggcagctgagccccgcccagagggccctgtacagggacgtgatgctggagaactacagcaacctggtctcactgggactcttaggacccaaaccagatacgttttcccagctagaaaaaagggaagtgtggatgccagaggacacccctggaggcttctgtcttgactggatgactatgcctgccagtaagaaatctactgtcaaggcagagattcctgaagaagaattggatcaatggacaataaaggaaagattcagtagcagtagtcactggaagtgtgctagcctgctggagtggcaatgtggaggccaggagatcagtttgcagcgagtggtactcactcaccccaacaccccatcacaggaatgtgatgaatccgggagcactatgagctcatctcttcacagtgatcaaagtcagggatttcaacctagcaaaaatgcctttgagtgtagtgagtgtggaaaagtcttctctaagagttcaactcttaataaacatcagaaaattcataatgaaaaaaatgcaaatcagaaaattcatattaaggagaaaagatatgaatgtagagaatgtgggaaagcctttcaccagagtacgcaccttatccatcaccaaagaattcacactggcgagaaaccctatgaatgtaaggaatgtggcaaggccttctcagtgagctcctcacttacgtaccatcagaaaattcatactggagagaagccttttgaatgcaacttatgtggaaaagcttttatccgaaatatacaccttgcccatcatcatagaatacatactggagagaaaccttttaaatgtaacatttgtgaaaaagcctttgtgtgcagggcacaccttaccaaacaccagaatatccacagtggagagaaaccctataaatgcaatgaatgtggaaaagcctttaatcagagtacaagtttccttcagcatcagagaattcacactggagagaaaccctttgaatgtaatgaatgtgggaaggccttcagggtgaactcttcccttactgaacatcagagaattcatactggagagaaaccttataaatgtaatgaatgtgggaaagctttcagggataattcatcctttgcacgacatcggaaaattcacactggagagaaaccttacagatgtggcttgtgtgagaaagcctttcgggaccaatcagcactagcccaacatcagagaattcatactggggaaaaaccttatacatgtaacatatgtgaaaaagccttcagtgaccattcagcccttacccaacataagagaattcatactagggaaaaaccttacaaatgtaaaatctgtgagaaagcctttatccgaagcactcacctgactcaacatcagaggattcacacaggagagaaaccctataaatgtaataaatgtgggaaagcttttaaccagactgcaaacctcattcagcatcagagacatcatattggagagaagtga

SEQ ID NO: 180 - DNA, 1626 bp, Homo sapiens
  source 1..1626: mol_type = unassigned DNA
atgccccgaaggaagcaaagccacccgcagcccgtgaaatgcgagggggtcaaagtggatactgaagactccctcgacgaaggacccggggccctggtattggagagtgatttgctactaggccaggatctggagtttgaggaggaagaggaagaggaggaaggcgacggcaacagtgaccagctcatgggcttcgagagagactcggaaggagactctctgggggccaggcctgggcttccctatgggctgagcgacgatgagtctgggggcggccgggcactaagtgcggagagtgaagttgaggagccagccaggggtccaggggaggccaggggtgagaggccaggcccagcctgccagctgtgtggggggccgacaggtgaggggccgtgttgtggggcaggagggccgggtggggggcccctgctgcccccacggctactgtactcatgccgcctctgcaccttcgtgtcccactactcgagccacctgaagcggcacatgcagacacacagcggagagaagccgttccgctgtggccgctgcccctacgcctcagcccagctcgtcaacctgacacgacatacccgcacccacactggcgagaagccctaccgctgtccccactgcccctttgcctgcagcagcctgggcaacctgaggcggcatcagcgtacccacgcagggccccccactcctccctgcccgacctgtggcttccgctgctgtactccacgaccagcccggcctcccagtcccacagagcaggagggggcggtgccccggcgacctgaagatgctctgctccttccagatttgagcctccatgtgccaccaggtggtgccagtttcctgccagactgtgggcagctgcggggtgaaggggagggcctctgcgggactggatcagaaccactgccagagctgctattcccttggacctgccggggctgtggacaagagctggaggagggtgagggtagtcggctgggagctgccatgtgtgggcgctgcatgcgaggagaggctggagggggtgccagtggggggccccagggccccagtgacaaaggctttgcctgtagcctctgcccctttgccactcactatcccaaccacctggcccggcacatgaagacacacagtggtgagaagcccttccgctgcgcccgctgtccttatgcctctgctcatctggataacctgaaacggcaccagcgcgtccatacaggagagaagccctacaagtgccccctctgcccttatgcctgtggcaatctggccaacctcaagcgtcatggtcgcatccactctggtgacaaaccttttcggtgtagcctttgcaactacagctgcaaccagagcatgaacctcaaacgtcacatgctgcggcacacaggcgagaagcccttccgctgtgccacctgcgcctataccacgggccactgggacaactacaagcgccaccagaaggtgcatggccacggtggggcaggagggcctggtctctctgcctctgagggctgggccccacctcatagcccaccctctgttttgagctctcggggcccaccagccctggggactgctggcagccgggctgtccacacagactcatcctga

SEQ ID NO: 181 - DNA, 1902 bp, Homo sapiens
  source 1..1902: mol_type = unassigned DNA
atgcttcgccgaggctataaggcctctgaaaggcgaagacacttgagcgagaggctcagctggcaccaagaccaggcgctgagtagcagcatctacctcctacgagagatgggccccactggcttcctgctgagggaggaggagccggaatacatggatttccgagtttttctaggaaatcctcacgtttgtaactgttccacatttccgaaaggaggggaactttgtaagcatatctgctgggtcttgttgaaaaaattcaagcttccaaggaaccatgaatctgctttacaactgggtcttggagaaagagagataagtgacttgcttcgggggatacatcgagttcaaactccccaaccaggaacaaatgacgaaaatgaacatgttgaagaagatgggtacattaaacagaaggaaattgattcagaggatatctgctctatttgtcaagagctacttttagagaaaaagcttcctgtcaccttttgcaggtttggctgtggcaatagtattcatataaaatgcatgaagatcttagctaattatcagagtacatcaaacacttccatgttgaaatgtcctctgtgcaggaaagagtttgcaccattaaaactgattttggaggaattcaaaaactctagcaaactagtagctgcagcagaaaaagagagactggacaaacaccttgggattccctgtaataactgcaaacagtttccaattgaggggaagtgttataagtgtaccgaatgcatagaatatcacttatgccaggaatgttttgatagctgctgccatctttcccacacgtttacatttcgtgagaaaagaaaccaaaaatggagatcactagaaaaaagagcagatgaagttgtaaaatacatagatactaaaaatgagattgaagaaaagatgtcacattttcaagaaaagcaaggccaagtttacacaccaaaacacattgtaagatcactgcctctccaactgattactaagaatagtaagctgcttgctccaggctaccagtgtctactttgtttgaaggcatttcatcttggtcaacatacaagattgctaccatgtactcacaagtttcacaggaagtgtattgacaactggttattccacaagtgcaattcatgccctattgatggacaagttatatataaccctttaacttggaaaaattcagcagtgaatggacaagcacatcagtctgtttcaaacagagacatcattcatctatcaaagcagaaagaaccagatctttttattcctggtactggattagtcttaaaacaaaatagacttggaattttacctagcatacctcagtgtaattttgatgaattgaatacacctcaaagcccaaaagatgcctatgaaaatacaacaatagataatctatgctctatcaaattagataattcaaattcaaaaaaattaacctatgattataaaattagccaacattttcccaggtatcttcaagatttacccactgtgtcatttgggaaaataccatctcaaacactgcttcctcctattgttcataagaatattgtgtgtcccactgcaatggaaagtccatgcatcagtggaaaatttcacactagtctaagccggatgaccaaaggctgtaaatgtaataaccacaacctaaagaagactcctgccactaaaataagagaggacaacaagagatcaactttacttccagaggatttcaatcttattgtcaattggagcacagctaaacttagtttgtctaaaaggtatagtaactgtatgggggaaattacacgaaaatgtagtcatctatcaagacagcctgtgtctcactctgtaaatacaaaaagtactgagctatctttaataatagaaggagttcaattgtga

SEQ ID NO: 182 - protein, 1321 aa, Homo sapiens
MSDSVILRSIKKFGEENDGFESDKSYNNDKKSRLQDEKKGDGVRVGFFQLFRFSSSTDIWLMFVGSLCAFLHGIAQPGVLLIFGTMTDVFIDYDVELQELQIPGKACVNNTIVWTNSSLNQNMTNGTRCGLLNIESEMIKFASYYAGIAVAVLITGYIQICFWVIAAARQIQKMRKFYFRRIMRMEIGWFDCNSVGELNTRFSDDINKINDAIADQMALFIQRMTSTICGFLLGFFRGWKLTLVIISVSPLIGIGAATIGLSVSKFTDYELKAYAKAGVVADEVISSMRTVAAFGGEKREVERYEKNLVFAQRWGIRKGIVMGFFTGFVWCLIFLCYALAFWYGSTLVLDEGEYTPGTLVQIFLSVIVGALNLGNASPCLEAFATGRAAATSIFETIDRKPIIDCMSEDGYKLDRIKGEIEFHNVTFHYPSRPEVKILNDLNMVIKPGEMTALVGPSGAGKSTALQLIQRFYDPCEGMVTVDGHDIRSLNIQWLRDQIGIVEQEPVLFSTTIAENIRYGREDATMEDIVQAAKEANAYNFIMDLPQQFDTLVGEGGGQMSGGQKQRVAIARALIRNPKILLLDMATSALDNESEAMVQEVLSKIQHGHTIISVAHRLSTVRAADTIIGFEHGTAVERGTHEELLERKGVYFTLVTLQSQGNQALNEEDIKDATEDDMLARTFSRGSYQDSLRASIRQRSKSQLSYLVHEPPLAVVDHKSTYEEDRKDKDIPVQEEVEPAPVRRILKFSAPEWPYMLVGSVGAAVNGTVTPLYAFLFSQILGTFSIPDKEEQRSQINGVCLLFVAMGCVSLFTQFLQGYAFAKSGELLTKRLRKFGFRAMLGQDIAWFDDLRNSPGALTTRLATDASQVQGAAGSQIGMIVNSFTNVTVAMIIAFSFSWKLSLVILCFFPFLALSGATQTRMLTGFASRDKQALEMVGQITNEALSNIRTVAGIGKERRFIEALETELEKPFKTAIQKANIYGFCFAFAQCIMFIANSASYRYGGYLISNEGLHFSYVFRVISAVVLSATALGRAFSYTPSYAKAKISAARFFQLLDRQPPISVYNTAGEKWDNFQGKIDFVDCKFTYPSRPDSQVLNGLSVSISPGQTLAFVGSSGCGKSTSIQLLERFYDPDQGKVMIDGHDSKKVNVQFLRSNIGIVSQEPVLFACSIMDNIKYGDNTKEIPMERVIAAAKQAQLHDFVMSLPEKYETNVGSQGSQLSRGEKQRIAIARAIVRDPKILLLDEATSALDTESEKTVQVALDKAREGRTCIVIAHRLSTIQNADIIAVMAQGVVIEKGTHEELMAQKGAYYKLVTTGSPIS

SEQ ID NO: 183 - protein, 911 aa, Homo sapiens
MVDYHAANQSYQYGPSSAGNGAGGGGSMGDYMAQEDDWDRDLLLDPAWEKQQRKTFTAWCNSHLRKAGTQIENIDEDFRDGLKLMLLLEVISGERLPKPERGKMRVHKINNVNKALDFIASKGVKLVSIGAEEIVDGNAKMTLGMIWTIILRFAIQDISVEETSAKEGLLLWCQRKTAPYKNVNVQNFHISWKDGLAFNALIHRHRPELIEYDKLRKDDPVTNLNNAFEVAEKYLDIPKMLDAEDIVNTARPDEKAIMTYVSSFYHAFSGAQKAETAANRICKVLAVNQENEHLMEDYEKLASDLLEWIRRTIPWLEDRVPQKTIQEMQQKLEDFRDYRRVHKPPKVQEKCQLEINFNTLQTKLRLSNRPAFMPSEGKMVSDINNGWQHLEQAEKGYEEWLLNEIRRLERLDHLAEKFRQKASIHEAWTDGKEAMLKHRDYETATLSDIKALIRKHEAFESDLAAHQDRVEQIAAIAQELNELDYYDSHNVNTRCQKICDQWDALGSLTHSRREALEKTEKQLEAIDQLHLEYAKRAAPFNNWMESAMEDLQDMFIVHTIEEIEGLISAHDQFKSTLPDADREREAILAIHKEAQRIAESNHIKLSGSNPYTTVTPQIINSKWEKVQQLVPKRDHALLEEQSKQQSNEHLRRQFASQANVVGPWIQTKMEEIGRISIEMNGTLEDQLSHLKQYERSIVDYKPNLDLLEQQHQLIQEALIFDNKHTNYTMEHIRVGWEQLLTTIARTINEVENQILTRDAKGISQEQMQEFRASFNHFDKDHGGALGPEEFKACLISLGYDVENDRQGEAEFNRIMSLVDPNHSGLVTFQAFIDFMSRETTDTDTADQVIASFKVLAGDKNFITAEELRRELPPDQAEYCIARMAPYQGPDAVPGALDYKSFSTALYGESDL

SEQ ID NO: 184 - protein, 804 aa, Homo sapiens
MNYQQQLANSAAIRAEIQRFESVHPNIYSIYELLERVEEPVLQNQIREHVIAIEDAFVNSQEWTLSRSVPELKVGIVGNLASGKSALVHRYLTGTYVQEESPEGGRFKKEIVVDGQSYLLLIRDEGGPPEAQFAMWVDAVIFVFSLEDEISFQTVYHYYSRMANYRNTSEIPLVLVGTQDAISSANPRVIDDARARKLSNDLKRCTYYETCATYGLNVERVFQDVAQKIVATRKKQQLSIGPCKSLPNSPSHSSVCSAQVSAVHISQTSNGGGSLSDYSSSVPSTPSTSQKELRIDVPPTANTPTPVRKQSKRRSNLFTSRKGSDPDKEKKGLESRADSIGSGRAIPIKQGMLLKRSGKSLNKEWKKKYVTLCDNGVLTYHPSLHDYMQNVHGKEIDLLRTTVKVPGKRPPRATSACAPISSPKTNGLSKDMSSLHISPNSDTGLGDSVCSSPSISSTTSPKLDPPPSPHANRKKHRRKKSTSNFKADGLSGTAEEQEENFEFIIVSLTGQTWHFEATTYEERDAWVQAIESQILASLQSCESSKNKSRLTSQSEAMALQSIRNMRGNSHCVDCETQNPNWASLNLGALMCIECSGIHRNLGTHLSRVRSLDLDDWPVELIKVMSSIGNELANSVWEESSQGRTKPSVDSTREEKERWIRAKYEQKLFLAPLPCTELSLGQHLLRATADEDLRTAILLLAHGSRDEVNETCGEGDGRTALHLACRKGNVVLAQLLIWYGVDVTARDAHGNTALAYARQASSQECIDVLLQYGCPDERFVLMATPNLSRRNNNRNNSSGRVPTII

SEQ ID NO: 185 - protein, 1620 aa, Homo sapiens
MGAIGLLWLLPLLLSTAAVGSGMGTGQRAGSPAAGPPLQPREPLSYSRLQRKSLAVDFVVPSLFRVYARDLLLPPSSSELKAGRPEARGSLALDCAPLLRLLGPAPGVSWTAGSPAPAEARTLSRVLKGGSVRKLRRAKQLVLELGEEAILEGCVGPPGEAAVGLLQFNLSELFSWWIRQGEGRLRIRLMPEKKASEVGREGRLSAAIRASQPRLLFQIFGTGHSSLESPTNMPSPSPDYFTWNLTWIMKDSFPFLSHRSRYGLECSFDFPCELEYSPPLHDLRNQSWSWRRIPSEEASQMDLLDGPGAERSKEMPRGSFLLLNTSADSKHTILSPWMRSSSEHCTLAVSVHRHLQPSGRYIAQLLPHNEAAREILLMPTPGKHGWTVLQGRIGRPDNPFRVALEYISSGNRSLSAVDFFALKNCSEGTSPGSKMALQSSFTCWNGTVLQLGQACDFHQDCAQGEDESQMCRKLPVGFYCNFEDGFCGWTQGTLSPHTPQWQVRTLKDARFQDHQDHALLLSTTDVPASESATVTSATFPAPIKSSPCELRMSWLIRGVLRGNVSLVLVENKTGKEQGRMVWHVAAYEGLSLWQWMVLPLLDVSDRFWLQMVAWWGQGSRAIVAFDNISISLDCYLTISGEDKILQNTAPKSRNLFERNPNKELKPGENSPRQTPIFDPTVHWLFTTCGASGPHGPTQAQCNNAYQNSNLSVEVGSEGPLKGIQIWKVPATDTYSISGYGAAGGKGGKNTMMRSHGVSVLGIFNLEKDDMLYILVGQQGEDACPSTNQLIQKVCIGENNVIEEEIRVNRSVHEWAGGGGGGGGATYVFKMKDGVPVPLIIAAGGGGRAYGAKTDTFHPERLENNSSVLGLNGNSGAAGGGGGWNDNTSLLWAGKSLQEGATGGHSCPQAMKKWGWETRGGFGGGGGGCSSGGGGGGYIGGNAASNNDPEMDGEDGVSFISPLGILYTPALKVMEGHGEVNIKHYLNCSHCEVDECHMDPESHKVICFCDHGTVLAEDGVSCIVSPTPEPHLPLSLILSVVTSALVAALVLAFSGIMIVYRRKHQELQAMQMELQSPEYKLSKLRTSTIMTDYNPNYCFAGKTSSISDLKEVPRKNITLIRGLGHGAFGEVYEGQVSGMPNDPSPLQVAVKTLPEVCSEQDELDFLMEALIISKFNHQNIVRCIGVSLQSLPRFILLELMAGGDLKSFLRETRPRPSQPSSLAMLDLLHVARDIACGCQYLEENHFIHRDIAARNCLLTCPGPGRVAKIGDFGMARDIYRASYYRKGGCAMLPVKWMPPEAFMEGIFTSKTDTWSFGVLLWEIFSLGYMPYPSKSNQEVLEFVTSGGRMDPPKNCPGPVYRIMTQCWQHQPEDRPNFAIILERIEYCTQDPDVINTALPIEYGPLVEEEEKVPVRPKDPEGVPPLLVSQQAKREEERSPAAPPPLPTTSSGKAAKKPTAAEISVRVPRGPAVEGGHVNMAFSQSNPPSELHKVHGSRNKPTSLWNPTYGSWFTEKPTKKNNPIAKKEPHDRGNLGLEGSCTVPPNVATGRLPGASLLLEPSSLTANMKEVPLFRLRHFPCGNVNYGYQQQGLPLEAATAPGAGHYEDTILKSKNSMNQPGP

SEQ ID NO: 186 - protein, 247 aa, Homo sapiens
MGAAVFFGCTFVAFGPAFALFLITVAGDPLRVIILVAGAFFWLVSLLLASVVWFILVHVTDRSDARLQYGLLIFGAAVSVLLQEVFRFAYYKLLKKADEGLASLSEDGRSPISIRQMAYVSGLSFGIISGVFSVINILADALGPGVVGIHGDSPYYFLTSAFLTAAIILLHTFWGVVFFDACERRRYWALGLVVGSHLLTSGLTFLNPWYEASLLPIYAVTVSMGLWAFITAGGSLRSIQRSLLCKD

SEQ ID NO: 187 - protein, 392 aa, Homo sapiens
MDALVEDDICILNHEKAHKRDTVTPVSIYSGDESVASHFALVTAYEDIKKRLKDSEKENSLLKKRIRFLEEKLIARFEEETSSVGREQVNKAYHAYREVCIDRDNLKSKLDKMNKDNSESLKVLNEQLQSKEVELLQLRTEVETQQVMRNLNPPSSNWEVEKLSCDLKIHGLEQELELMRKECSDLKIELQKAKQTDPYQEDNLKSRDLQKLSISSDNMQHAYWELKREMSNLHLVTQVQAELLRKLKTSTAIKKACAPVGCSEDLGRDSTKLHLMNFTATYTRHPPLLPNGKALCHTTSSPLPGDVKVLSEKAILQSWTDNERSIPNDGTCFQEHSSYGRNSLEDNSWVFPSPPKSSETAFGETKTKTLPLPNLPPLHYLDQHNQNCLYKN

SEQ ID NO: 188 - protein, 612 aa, Homo sapiens
MSNSHPLRPFTAVGEIDHVHILSEHIGALLIGEEYGDVTFVVEKKRFPAHRVILAARCQYFRALLYGGMRESQPEAEIPLQDTTAEAFTMLLKYIYTGRATLTDEKEEVLLDFLSLAHKYGFPELEDSTSEYLCTILNIQNVCMTFDVASLYSLPKLTCMCCMFMDRNAQEVLSSEGFLSLSKTALLNIVLRDSFAAPEKDIFLALLNWCKHNSKENHAEIMQAVRLPLMSLTELLNVVRPSGLLSPDAILDAIKVRSESRDMDLNYRGMLIPEENIATMKYGAQVVKGELKSALLDGDTQNYDLDHGFSRHPIDDDCRSGIEIKLGQPSIINHIRILLWDRDSRSYSYFIEVSMDELDWVRVIDHSQYLCRSWQKLYFPARVCRYIRIVGTHNTVNKIFHIVAFECMFTNKTFTLEKGLIVPMENVATIADCASVIEGVSRSRNALLNGDTKNYDWDSGYTCHQLGSGAIVVQLAQPYMIGSIRLLLWDCDDRSYSYYVEVSTNQQQWTMVADRTKVSCKSWQSVTFERQPASFIRIVGTHNTANEVFHCVHFECPEQQSSQKEENSEESGTGDTSLAGQQLDSHALRAPSGSSLPSSPGSNSRSPNRQHQ

SEQ ID NO: 189 - skipped

SEQ ID NO: 190 - protein, 287 aa, Homo sapiens
MEEKEDKHQQHKIEDAAITYVSENEEIKHEEKPGKSIHHSKSHVGRGRIYYAKFINTNARTYNEPFPYIDPKKGPEIQGDWWSHGKALEPVFLPPYDSKSTQRSDFQKPSCPLVLPVKHSKMQKPSCGIVPLASPGTSAELQNNFIEYISFIHQYDARKTPNEPLQGKRHGAFVQREIKPGSRPTVPKGAEVLLNTPGSRSSEQSKKTEKGNSAESRMISPGLCQQNSQELLEPKTHLSETDVRQAAKACPSTPESREKTSGATQTTVGDALFTRHKPLNPPIKKSE

SEQ ID NO: 191 - protein, 684 aa, Homo sapiens
MSLWPPFRCRWKLAPRYSRRASPQQPQQDFEALLAECLRNGCLFEDTSFPATLSSIGSGSLLQKLPPRLQWKRPPELHSNPQFYFAKAKRLDLCQGIVGDCWFLAALQALALHQDILSRVVPLNQSFTEKYAGIFRFWFWHYGNWVPVVIDDRLPVNEAGQLVFVSSTYKNLFWGALLEKAYAKLSGSYEDLQSGQVSEALVDFTGGVTMTINLAEAHGNLWDILIEATYNRTLIGCQTHSGEKILENGLVEGHAYTLTGIRKVTCKHRPEYLVKLRNPWGKVEWKGDWSDSSSKWELLSPKEKILLLRKDNDGEFWMTLQDFKTHFVLLVICKLTPGLLSQEAAQKWTYTMREGRWEKRSTAGGQRQLLQDTFWKNPQFLLSVWRPEEGRRSLRPCSVLVSLLQKPRHRCRKRKPLLAIGFYLYRMNKYHDDQRRLPPEFFQRNTPLSQPDRFLKEKEVSQELCLEPGTYLIVPCILEAHQKSEFVLRVFSRKHIFYEIGSNSGVVFSKEIEDQNERQDEFFTKFFEKHPEINAVQLQNLLNQMTWSSLGSRQPFFSLEACQGILALLDLNASGTMSIQEFRDLWKQLKLSQKVFHKQDRGSGYLNWEQLHAAMREAGIMLSDDVCQLMLIRYGGPRLQMDFVSFIHLMLRVENMEDVFQNLTQDGKGIYLQKPEWMMMALYS

SEQ ID NO: 192 - protein, 1371 aa, Homo sapiens
MTEESSDVPRELIESIKDVIGRKIKISVKKKVKLEVKGDKVENKVLVLTSCRAFLVTARIPTKLELTFSYLEIHGVVCSKSAQMIVETEKCSISMKMASPEDVSEVLAHIGTCLRKIFPGLSPVRIMKKVSMEPSERLASLQALWDSQTVAEQGPCGGFSQMYACVCDWLGFSYREEVQWDVDTIYLTQDTRELNLQDFSHLDHRDLIPIIAALEYNQWFTKLSSKDLKLSTDVCEQILRVVSRSNRLEELVLENAGLRTDFAQKLASALAHNPNSGLHTINLAGNPLEDRGVSSLSIQFAKLPKGLKHLNLSKTSLSPKGVNSLSQSLSANPLTASTLVHLDLSGNVLRGDDLSHMYNFLAQPNAIVHLDLSNTECSLDMVCGALLRGCLQYLAVLNLSRTVFSHRKGKEVPPSFKQFFSSSLALMHINLSGTKLSPEPLKALLLGLACNHNLKGVSLDLSNCELRSGGAQVLEGCIAEIHNITSLDISDNGLESDLSTLIVWLSKNRSIQHLALGKNFNNMKSKNLTPVLDNLVQMIQDEESPLQSLSLADSKLKTEVTIIINALGSNTSLTKVDISGNGMGDMGAKMLAKALQINTKLRTVIWDKNNITAQGFQDIAVAMEKNYTLRFMPIPMYDASQALKTNPEKTEDALQKIENYLLRNHETRKYLQEQAYRLQQGIVTSTTQQMIDRICVKVQDHLNSLRNCGGDAIQEDLKSAERLMRDAKNSKTLLPNLYHVGGASWAGASGLLSSPIQETLESMAGEVTRVVDEQLKALLESMVDAAENLCPNVMKKAHIRQDLIHASTEKISIPRTFVKNVLLEQSGIDILNKISEVKLTVASFLSDRIVDEILDALSHCHHKLADHFSRRGKTLPQQESLEIELAEEKPVKRSIITVEELTEIERLEDLDTCMMTPKSKRKSIHSRMLRPVSRAFEMEFDLDKALEEVPIHIEDPPFPSLRQEKRSSGFISELPSEEGKKLEHFTKLRPKRNKKQQPTQAAVCAANIVSQDGEQNGLMGRVDEGVDEFFTKKVTKMDSKKWSTRGSESHELNEGGDEKKKRDSRKSSGFLNLIKSRSKSERPPTILMTEEPSSPKGAVRSPPVDCPRKDTKAAEHNGNSERIEEIKTPDSFEESQGEEIGKVERSDSKSSPQAGRRYGVQVMGSGLLAEMKAKQEKRAACAQKKLGNDAVSQDSSSPALSGVERSDGGGAVPKLHPGLPENRFGLGTPEKNTKAEPKAEAGSRSRSSSSTPTSPKPLLQSPKPSLAARPVIPQKPRTASRPDDIPDSPSSPKVALLPPVLKKVPSDKERDGQSSPQPSPRTFSQEVSRRSWGQQAQEYQEQKQRSSSKDGHQGSKSNDSGEEAEKEFIFV

SEQ ID NO: 193 - protein, 496 aa, Homo sapiens
MDFSRNLYDIGEQLDSEDLASLKFLSLDYIPQRKQEPIKDALMLFQRLQEKRMLEESNLSFLKELLFRINRLDLLITYLNTRKEEMERELQTPGRAQISAYRFHFCRMSWAEANSQCQTQSVPFWRRVDHLLIRVMLYQISEEVSRSELRSFKFLLQEEISKCKLDDDMNLLDIFIEMEKRVILGEGKLDILKRVCAQINKSLLKIINDYEEFSKGEELCGVMTISDSPREQDSESQTLDKVYQMKSKPRGYCLIINNHNFAKAREKVPKLHSIRDRNGTHLDAGALTTTFEELHFEIKPHDDCTVEQIYEILKIYQLMDHSNMDCFICCILSHGDKGIIYGTDGQEAPIYELTSQFTGLKCPSLAGKPKVFFIQACQGDNYQKGIPVETDSEEQPYLEMDLSSPQTRYIPDEADFLLGMATVNNCVSYRNPAEGTWYIQSLCQSLRERCPRGDDILTILTEVNYEVSNKDDKKNMGKQMPQPTFTLRKKLVFPSD

SEQ ID NO: 194 - protein, 1719 aa, Homo sapiens
MSGEVRLRQLEQFILDGPAQTNGQCFSVETLLDILICLYDECNNSPLRREKNILEYLEWAKPFTSKVKQMRLHREDFEILKVIGRGAFGEVAVVKLKNADKVFAMKILNKWEMLKRAETACFREERDVLVNGDNKWITTLHYAFQDDNNLYLVMDYYVGGDLLTLLSKFEDRLPEDMARFYLAEMVIAIDSVHQLHYVHRDIKPDNILMDMNGHIRLADFGSCLKLMEDGTVQSSVAVGTPDYISPEILQAMEDGKGRYGPECDWWSLGVCMYEMLYGETPFYAESLVETYGKIMNHKERFQFPAQVTDVSENAKDLIRRLICSREHRLGQNGIEDFKKHPFFSGIDWDNIRNCEAPYIPEVSSPTDTSNFDVDDDCLKNSETMPPPTHTAFSGHHLPFVGFTYTSSCVLSDRSCLRVTAGPTSLDLDVNVQRTLDNNLATEAYERRIKRLEQEKLELSRKLQESTQTVQALQYSTVDGPLTASKDLEIKNLKEEIEKLRKQVTESSHLEQQLEEANAVRQELDDAFRQIKAYEKQIKTLQQEREDLNKELVQASERLKNQSKELKDAHCQRKLAMQEFMEINERLTELHTQKQKLARHVRDKEEEVDLVMQKVESLRQELRRTERAKKELEVHTEALAAEASKDRKLREQSEHYSKQLENELEGLKQKQISYSPGVCSIEHQQEITKLKTDLEKKSIFYEEELSKREGIHANEIKNLKKELHDSEGQQLALNKEIMILKDKLEKTRRESQSEREEFESEFKQQYEREKVLLTEENKKLTSELDKLTTLYENLSIHNQQLEEEVKDLADKKESVAHWEAQITEIIQWVSDEKDARGYLQALASKMTEELEALRNSSLGTRATDMPWKMRRFAKLDMSARLELQSALDAEIRAKQAIQEELNKVKASNIITECKLKDSEKKNLELLSEIEQLIKDTEELRSEKGIEHQDSQHSFLAFLNTPTDALDQFETVDSTPLSVHTPTLRKKGCPGSTGFPPKRKTHQFFVKSFTTPTKCHQCTSLMVGLIRQGCSCEVCGFSCHITCVNKAPTTCPVPPEQTKGPLGIDPQKGIGTAYEGHVRIPKPAGVKKGWQRALAIVCDFKLFLYDIAEGKASQPSVVISQVIDMRDEEFSVSSVLASDVIHASRKDIPCIFRVTASQLSASNNKCSILMLADTENEKNKWVGVLSELHKILKKNKFRDRSVYVPKEAYDSTLPLIKTTQAAAIIDHERIALGNEEGLFVVHVTKDEIIRVGDNKKIHQIELIPNDQLVAVISGRNRHVRLFPMSALDGRETDFYKLSETKGCQTVTSGKVRHGALTCLCVAMKRQVLCYELFQSKTRHRKFKEIQVPYNVQWMAIFSEQLCVGFQSGFLRYPLNGEGNPYSMLHSNDHTLSFIAHQPMDAICAVEISSKEYLLCFNSIGIYTDCQGRRSRQQELMWPANPSSCCYNAPYLSVYSENAVDIFDVNSMEWIQTLPLKKVRPLNNEGSLNLLGLETIRLIYFKNKMAEGDELVVPETSDNSRKQMVRNINNKRRYSFRVPEEERMQQRREMLRDPEMRNKLISNPTNFNHIAHMGPGDGIQILKDLPMNPRPQESRTVFSGSVSIPSITKSRPEPGRSMSASSGLSARSSAQNGSALKREFSGGSYSAKRQPMPSPSEGSLSSGGMDQGSDAPARDFDGEDSDSPRHSTASNSSNLSSPPSPASPRKTKSLSLESTDRGSWDP

SEQ ID NO: 195 - protein, 185 aa, Homo sapiens
MGQCLRYQMHWEDLEEYQALTFLTRNEILCIHDTFLKLCPPGKYYKEATLTMDQVSSLPALRVNPFRDRICRVFSHKGMFSFEDVLGMASVFSEQACPSLKIEYAFRIYDFNENGFIDEEDLQRIILRLLNSDDMSEDLLMDLTNHVLSESDLDNDNMLSFSEFEHAMAKSPDFMNSFRIHFWGC

SEQ ID NO: 196 - protein, 1306 aa, Homo sapiens
MDSLPRLTSVLTLLFSGLWHLGLTATNYNCDDPLASLLSPMAFSSSSDLTGTHSPAQLNWRVGTGGWSPADSNAQQWLQMDLGNRVEITAVATQGRYGSSDWVTSYSLMFSDTGRNWKQYKQEDSIWTFAGNMNADSVVHHKLLHSVRARFVRFVPLEWNPSGKIGMRVEVYGCSYKSDVADFDGRSSLLYRFNQKLMSTLKDVISLKFKSMQGDGVLFHGEGQRGDHITLELQKGRLALHLNLGDSKARLSSSLPSATLGSLLDDQHWHSVLIERVGKQVNFTVDKHTQHFRTKGETDALDIDYELSFGGIPVPGKPGTFLKKNFHGCIENLYYNGVNIIDLAKRRKHQIYTGNVTFSCSEPQIVPITFVNSSGSYLLLPGTPQIDGLSVSFQFRTWNKDGLLLSTELSEGSGTLLLSLEGGILRLVIQKMTERVAEILTGSNLNDGLWHSVSINARRNRITLTLDDEAAPPAPDSTWVQIYSGNSYYFGGCPDNLTDSQCLNPIKAFQGCMRLIFIDNQPKDLISVQQGSLGNFSDLHIDLCSIKDRCLPNYCEHGGSCSQSWTTFYCNCSDTSYTGATCHNSIYEQSCEVYRHQGNTAGFFYIDSDGSGPLGPLQVYCNITEDKIWTSVQHNNTELTRVRGANPEKPYAMALDYGGSMEQLEAVIDGSEHCEQEVAYHCRRSRLLNTPDGTPFTWWIGRSNERHPYWGGSPPGVQQCECGLDESCLDIQHFCNCDADKDEWTNDTGFLSFKDHLPVTQIVITDTDRSNSEAAWRIGPLRCYGDRRFWNAVSFYTEASYLHFPTFHAEFSADISFFFKTTALSGVFLENLGIKDFIRLEISSPSEITFAIDVGNGPVELVVQSPSLLNDNQWHYVRAERNLKETSLQVDNLPRSTRETSEEGHFRLQLNSQLFVGGTSSRQKGFLGCIRSLHLNGQKMDLEERAKVTSGVRPGCPGHCSSYGSICHNGGKCVEKHNGYLCDCTNSPYEGPFCKKEVSAVFEAGTSVTYMFQEPYPVTKNISLSSSAIYTDSAPSKENIALSFVTTQAPSLLLFINSSSQDFVVVLLCKNGSLQVRYHLNKEETHVFTIDADNFANRRMHHLKINREGRELTIQMDQQLRLSYNFSPEVEFRVIRSLTLGKVTENLGLDSEVAKANAMGFAGCMSSVQYNHIAPLKAALRHATVAPVTVHGTLTESSCGFMVDSDVNAVTTVHSSSDPFGKTDEREPLTNAVRSDSAVIGGVIAVVIFIIFCIIGIMTRFLYQHKQSHRTSQMKEKEYPENLDSSFRNEIDLQNTVSECKREYFI

SEQ ID NO: 197 - skipped

SEQ ID NO: 198 - protein, 1466 aa, Homo sapiens
MMSFVQKGSWLLLALLHPTIILAQQEAVEGGCSHLGQSYADRDVWKPEPCQICVCDSGSVLCDDIICDDQELDCPNPEIPFGECCAVCPQPPTAPTRPPNGQGPQGPKGDPGPPGIPGRNGDPGIPGQPGSPGSPGPPGICESCPTGPQNYSPQYDSYDVKSGVAVGGLAGYPGPAGPPGPPGPPGTSGHPGSPGSPGYQGPPGEPGQAGPSGPPGPPGAIGPSGPAGKDGESGRPGRPGERGLPGPPGIKGPAGIPGFPGMKGHRGFDGRNGEKGETGAPGLKGENGLPGENGAPGPMGPRGAPGERGRPGLPGAAGARGNDGARGSDGQPGPPGPPGTAGFPGSPGAKGEVGPAGSPGSNGAPGQRGEPGPQGHAGAQGPPGPPGINGSPGGKGEMGPAGIPGAPGLMGARGPPGPAGANGAPGLRGGAGEPGKNGAKGEPGPRGERGEAGIPGVPGAKGEDGKDGSPGEPGANGLPGAAGERGAPGFRGPAGPNGIPGEKGPAGERGAPGPAGPRGAAGEPGRDGVPGGPGMRGMPGSPGGPGSDGKPGPPGSQGESGRPGPPGPSGPRGQPGVMGFPGPKGNDGAPGKNGERGGPGGPGPQGPPGKNGETGPQGPPGPTGPGGDKGDTGPPGPQGLQGLPGTGGPPGENGKPGEPGPKGDAGAPGAPGGKGDAGAPGERGPPGLAGAPGLRGGAGPPGPEGGKGAAGPPGPPGAAGTPGLQGMPGERGGLGSPGPKGDKGEPGGPGADGVPGKDGPRGPTGPIGPPGPAGQPGDKGEGGAPGLPGIAGPRGSPGERGETGPPGPAGFPGAPGQNGEPGGKGERGAPGEKGEGGPPGVAGPPGGSGPAGPPGPQGVKGERGSPGGPGAAGFPGARGLPGPPGSNGNPGPPGPSGSPGKDGPPGPAGNTGAPGSPGVSGPKGDAGQPGEKGSPGAQGPPGAPGPLGIAGITGARGLAGPPGMPGPRGSPGPQGVKGESGKPGANGLSGERGPPGPQGLPGLAGTAGEPGRDGNPGSDGLPGRDGSPGGKGDRGENGSPGAPGAPGHPGPPGPVGPAGKSGDRGESGPAGPAGAPGPAGSRGAPGPQGPRGDKGETGERGAAGIKGHRGFPGNPGAPGSPGPAGQQGAIGSPGPAGPRGPVGPSGPPGKDGTSGHPGPIGPPGPRGNRGERGSEGSPGHPGQPGPPGPPGAPGPCCGGVGAAAIAGIGGEKAGGFAPYYGDEPMDFKINTDEIMTSLKSVNGQIESLISPDGSRKNPARNCRDLKFCHPELKSGEYWVDPNQGCKLDAIKVFCNMETGETCISANPLNVPRKHWWTDSSAEKKHVWFGESMDGGFQFSYGNPELPEDVLDVHLAFLRLLSSRASQNITYHCKNSIAYMDQASGNVKKALKLMGSNEGEFKAEGNSKFTYTVLEDGCTKHTGEWSKTVFEYRTRKAVRLPIVDIAPYDIGGPDQEFGVDVGPVCFL

SEQ ID NO: 199 - protein, 472 aa, Homo sapiens
MKFLIFAFFGGVHLLSLCSGKAICKNGISKRTFEEIKEEIASCGDVAKAIINLAVYGKAQNRSYERLALLVDTVGPRLSGSKNLEKAIQIMYQNLQQDGLEKVHLEPVRIPHWERGEESAVMLEPRIHKIAILGLGSSIGTPPEGITAEVLVVTSFDELQRRASEARGKIVVYNQPYINYSRTVQYRTQGAVEAAKVGALASLIRSVASFSIYSPHTGIQEYQDGVPKIPTACITVEDAEMMSRMASHGIKIVIQLKMGAKTYPDTDSFNTVAEITGSKYPEQVVLVSGHLDSWDVGQGAMDDGGGAFISWEALSLIKDLGLRPKRTLRLVLWTAEEQGGVGAFQYYQLHKVNISNYSLVMESDAGTFLPTGLQFTGSEKARAIMEEVMSLLQPLNITQVLSHGEGTDINFWIQAGVPGASLLDDLYKYFFFHHSHGDTMTVMDPKQMNVAAAVWAVVSYVVADMEEMLPRS

SEQ ID NO: 200 - protein, 514 aa, Homo sapiens
MGRPESAGGGSRGPFEGGGRARRAGGIFLTLSILRTRDLPSGAMSEGVDLIDIYADEEFNQDPEFNNTDQIDLYDDVLTATSQPSDDRSSSTEPPPPVRQEPSPKPNNKTPAILYTYSGLRNRRAAVYVGSFSWWTTDQQLIQVIRSIGVYDVVELKFAENRANGQSKGYAEVVVASENSVHKLLELLPGKVLNGEKVDVRPATRQNLSQFEAQARKRECVRVPRGGIPPRAHSRDSSDSADGRATPSENLVPSSARVDKPPSVLPYFNRPPSALPLMGLPPPPIPPPPPLSSSFGVPPPPPGIHYQHLMPPPPRLPPHLAVPPPGAIPPALHLNPAFFPPPNATVGPPPDTYMKASAPYNHHGSRDSGPPPSTVSEAEFEDIMKRNRAISSSAISKAVSGASAGDYSDAIETLLTAIAVIKQSRVANDERCRVLISSLKDCLHGIEAKSYSVGASGSSSRKRHRSRERSPSRSRESSRRHRDLLHNEDRHDDYFQERNREHERHRDRERDRHH

SEQ ID NO: 201 - protein, 2442 aa, Homo sapiens
MAENLLDGPPNPKRAKLSSPGFSANDSTDFGSLFDLENDLPDELIPNGGELGLLNSGNLVPDAASKHKQLSELLRGGSGSSINPGIGNVSASSPVQQGLGGQAQGQPNSANMASLSAMGKSPLSQGDSSAPSLPKQAASTSGPTPAASQALNPQAQKQVGLATSSPATSQTGPGICMNANFNQTHPGLLNSNSGHSLINQASQGQAQVMNGSLGAAGRGRGAGMPYPTPAMQGASSSVLAETLTQVSPQMTGHAGLNTAQAGGMAKMGITGNTSPFGQPFSQAGGQPMGATGVNPQLASKQSMVNSLPTFPTDIKNTSVTNVPNMSQMQTSVGIVPTQAIATGPTADPEKRKLIQQQLVLLLHAHKCQRREQANGEVRACSLPHCRTMKNVLNHMTHCQAGKACQVAHCASSRQIISHWKNCTRHDCPVCLPLKNASDKRNQQTILGSPASGIQNTIGSVGTGQQNATSLSNPNPIDPSSMQRAYAALGLPYMNQPQTQLQPQVPGQQPAQPQTHQQMRTLNPLGNNPMNIPAGGITTDQQPPNLISESALPTSLGATNPLMNDGSNSGNIGTLSTIPTAAPPSSTGVRKGWHEHVTQDLRSHLVHKLVQAIFPTPDPAALKDRRMENLVAYAKKVEGDMYESANSRDEYYHLLAEKIYKIQKELEEKRRSRLHKQGILGNQPALPAPGAQPPVIPQAQPVRPPNGPLSLPVNRMQVSQGMNSFNPMSLGNVQLPQAPMGPRAASPMNHSVQMNSMGSVPGMAISPSRMPQPPNMMGAHTNNMMAQAPAQSQFLPQNQFPSSSGAMSVGMGQPPAQTGVSQGQVPGAALPNPLNMLGPQASQLPCPPVTQSPLHPTPPPASTAAGMPSLQHTTPPGMTPPQPAAPTQPSTPVSSSGQTPTPTPGSVPSATQTQSTPTVQAAAQAQVTPQPQTPVQPPSVATPQSSQQQPTPVHAQPPGTPLSQAAASIDNRVPTPSSVASAETNSQQPGPDVPVLEMKTETQAEDTEPDPGESKGEPRSEMMEEDLQGASQVKEETDIAEQKSEPMEVDEKKPEVKVEVKEEEESSSNGTASQSTSPSQPRKKIFKPEELRQALMPTLEALYRQDPESLPFRQPVDPQLLGIPDYFDIVKNPMDLSTIKRKLDTGQYQEPWQYVDDVWLMFNNAWLYNRKTSRVYKFCSKLAEVFEQEIDPVMQSLGYCCGRKYEFSPQTLCCYGKQLCTIPRDAAYYSYQNRYHFCEKCFTEIQGENVTLGDDPSQPQTTISKDQFEKKKNDTLDPEPFVDCKECGRKMHQICVLHYDIIWPSGFVCDNCLKKTGRPRKENKFSAKRLQTTRLGNHLEDRVNKFLRRQNHPEAGEVFVRVVASSDKTVEVKPGMKSRFVDSGEMSESFPYRTKALFAFEEIDGVDVCFFGMHVQEYGSDCPPPNTRRVYISYLDSIHFFRPRCLRTAVYHEILIGYLEYVKKLGYVTGHIWACPPSEGDDYIFHCHPPDQKIPKPKRLQEWYKKMLDKAFAERIIHDYKDIFKQATEDRLTSAKELPYFEGDFWPNVLEESIKELEQEEEERKKEESTAASETTEGSQGDSKNAKKKNNKKTNKNKSSISRANKKKPSMPNVSNDLSQKLYATMEKHKEVFFVIHLHAGPVINTLPPIVDPDPLLSCDLMDGRDAFLTLARDKHWEFSSLRRSKWSTLCMLVELHTQGQDRFVYTCNECKHHVETRWHCTVCEDYDLCINCYNTKSHAHKMVKWGLGLDDEGSSQGEPQSKSPQESRRLSIQRCIQSLVHACQCRNANCSLPSCQKMKRVVQHTKGCKRKTNGGCPVCKQLIALCCYHAKHCQENKCPVPFCLNIKHKLRQQQIQHRLQQAQLMRRRMATMNTRNVPQQSLPSPTSAPPGTPTQQPSTPQTPQPPAQPQPSPVSMSPAGFPSVARTQPPTTVSTGKPTSQVPAPPPPAQPPPAAVEAARQIEREAQQQQHLYRVNINNSMPPGRTGMGTPGSQMAPVSLNVPRPNQVSGPVMPSMPPGQWQQAPLPQQQPMPGLPRPVISMQAQAAVAGPRMPSVQPPRSISPSALQDLLRTLKSPSSPQQQQQVLNILKSNPQLMAAFIKQRTAKYVANQPGMQPQPGLQSQPGMQPQPGMHQQPSLQNLNAMQAGVPRPGVPPQQQAMGGLNPQGQALNIMNPGHNPNMASMNPQYREMLRRQLLQQQQQQQQQQQQQQQQQQGSAGMAGGMAGHGQFQQPQGPGGYPPAMQQQQRMQQHLPLQGSSMGQMAAQMGQLGQMGQPGLGADSTPNIQQALQQRILQQQQMKQQIGSPGQPNPMSPQQHMLSGQPQASHLPGQQIATSLSNQVRSPAPVQSPRPQSQPPHSSPSPRIQPQPSPHHVSPQTGSPHPGLAVTMASSIDQGHLGNPEQSAMLPQLNTPSRSALSSELSLVGDTTGDTLEKFVEGL

SEQ ID NO: 202 - protein, 440 aa, Homo sapiens
MGSSHLLNKGLPLGVRPPIMNGPLHPRPLVALLDGRDCTVEMPILKDVATVAFCDAQSTQEIHEKVLNEAVGALMYHTITLTREDLEKFKALRIIVRIGSGFDNIDIKSAGDLGIAVCNVPAASVEETADSTLCHILNLYRRATWLHQALREGTRVQSVEQIREVASGAARIRGETLGIIGLGRVGQAVALRAKAFGFNVLFYDPYLSDGVERALGLQRVSTLQDLLFHSDCVTLHCGLNEHNHHLINDFTVKQMRQGAFLVNTARGGLVDEKALAQALKEGRIRGAALDVHESEPFSFSQGPLKDAPNLICTPHAAWYSEQASIEMREEAAREIRRAITGRIPDSLKNCVNKDHLTAATHWASMDPAVVHPELNGAAYRYPPGVVGVAPTGIPAAVEGIVPSAMSLSHGLPPVAHPPHAPSPGQTVKPEADRDHASDQL

SEQ ID NO: 203 - protein, 941 aa, Homo sapiens
MDDSEVESTASILASVKEQEAQFEKLTRALEEERRHVSAQLERVRVSPQDANPLMANGTLTRRHQNGRFVGDADLERQKFSDLKLNGPQDHSHLLYSTIPRMQEPGQIVETYTEEDPEGAMSVVSVETSDDGTTRRTETTVKKVVKTVTTRTVQPVAMGPDGLPVDASSVSNNYIQTLGRDFRKNGNGGPGPYVGQAGTATLPRNFHYPPDGYSRHYEDGYPGGSDNYGSLSRVTRIEERYRPSMEGYRAPSRQDVYGPQPQVRVGGSSVDLHRFHPEPYGLEDDQRSMGYDDLDYGMMSDYGTARRTGTPSDPRRRLRSYEDMIGEEVPSDQYYWAPLAQHERGSLASLDSLRKGGPPPPNWRQPELPEVIAMLGFRLDAVKSNAAAYLQHLCYRNDKVKTDVRKLKGIPVLVGLLDHPKKEVHLGACGALKNISFGRDQDNKIAIKNCDGVPALVRLLRKARDMDLTEVITGTLWNLSSHDSIKMEIVDHALHALTDEVIIPHSGWEREPNEDCKPRHIEWESVLTNTAGCLRNVSSERSEARRKLRECDGLVDALIFIVQAEIGQKDSDSKLVENCVCLLRNLSYQVHREIPQAERYQEAAPNVANNTGPHAASCFGAKKGKGKKPIEDPANDTVDFPKRTSPARGYELLFQPEVVRIYISLLKESKTPAILEASAGAIQNLCAGRWTYGRYIRSALRQEKALSAIADLLTNEHERVVKAASGALRNLAVDARNKELIGKHAIPNLVKNLPGGQQNSSWNFSEDTVISILNTINEVIAENLEAAKKLRETQGIEKLVLINKSGNRSEKEVRAAALVLQTIWGYKELRKPLEKEGWKKSDFQVNLNNASRSQSSHSYDDSTLPLIDRNQKSDNNYSTPNERGDHNRTLDRSGDLGDMEPLKGTTPLMQDEGQESLEEELDVLVLDDEGGQVSYPSMQKI

SEQ ID NO: 204 - protein, 509 aa, Homo sapiens
MAAAAGMLLLGLLQAGGSVLGQAMEKVTGGNLLSMLLIACAFTLSLVYLIRLAAGHLVQLPAGVKSPPYIFSPIPFLGHAIAFGKSPIEFLENAYEKYGPVFSFTMVGKTFTYLLGSDAAALLFNSKNEDLNAEDVYSRLTTPVFGKGVAYDVPNPVFLEQKKMLKSGLNIAHFKQHVSIIEKETKEYFESWGESGEKNVFEALSELIILTASHCLHGKEIRSQLNEKVAQLYADLDGGFSHAAWLLPGWLPLPSFRRRDRAHREIKDIFYKAIQKRRQSQEKIDDILQTLLDATYKDGRPLTDDEVAGMLIGLLLAGQHTSSTTSAWMGFFLARDKTLQKKCYLEQKTVCGENLPPLTYDQLKDLNLLDRCIKETLRLRPPIMIMMRMARTPQTVAGYTIPPGHQVCVSPTVNQRLKDSWVERLDFNPDRYLQDNPASGEKFAYVPFGAGRHRCIGENFAYVQIKTIWSTMLRLYEFDLIDGYFPTVNYTTMIHTPENPVIRYKRRSK

SEQ ID NO: 205 - protein, 158 aa, Homo sapiens
MGSGSSRSSRTLRRRRSPESLPAGPGAAALEGGTRRRVPVAAAEVPGAAAEEAPGRDPSPVAPPDGRDETLRLLDELLAESAAWGPPEPAPRRPARLRPTAVAGSAVCAEQSTEGHPGSGNVSEAPGSGRKKPERPAAISYDHSEEGLMASIEREYCR

SEQ ID NO: 206 - skipped

SEQ ID NO: 207 - protein, 976 aa, Homo sapiens
MELQAARACFALLWGCALAAAAAAQGKEVVLLDFAAAGGELGWLTHPYGKGWDLMQNIMNDMPIYMYSVCNVMSGDQDNWLRTNWVYRGEAERIFIELKFTVRDCNSFPGGASSCKETFNLYYAESDLDYGTNFQKRLFTKIDTIAPDEITVSSDFEARHVKLNVEERSVGPLTRKGFYLAFQDIGACVALLSVRVYYKKCPELLQGLAHFPETIAGSDAPSLATVAGTCVDHAVVPPGGEEPRMHCAVDGEWLVPIGQCLCQAGYEKVEDACQACSPGFFKFEASESPCLECPEHTLPSPEGATSCECEEGFFRAPQDPASMPCTRPPSAPHYLTAVGMGAKVELRWTPPQDSGGREDIVYSVTCEQCWPESGECGPCEASVRYSEPPHGLTRTSVTVSDLEPHMNYTFTVEARNGVSGLVTSRSFRTASVSINQTEPPKVRLEGRSTTSLSVSWSIPPPQQSRVWKYEVTYRKKGDSNSYNVRRTEGFSVTLDDLAPDTTYLVQVQALTQEGQGAGSKVHEFQTLSPEGSGNLAVIGGVAVGVVLLLVLAGVGFFIHRRRKNQRARQSPEDVYFSKSEQLKPLKTYVDPHTYEDPNQAVLKFTTEIHPSCVTRQKVIGAGEFGEVYKGMLKTSSGKKEVPVAIKTLKAGYTEKQRVDFLGEAGIMGQFSHHNIIRLEGVISKYKPMMIITEYMENGALDKFLREKDGEFSVLQLVGMLRGIAAGMKYLANMNYVHRDLAARNILVNSNLVCKVSDFGLSRVLEDDPEATYTTSGGKIPIRWTAPEAISYRKFTSASDVWSFGIVMWEVMTYGERPYWELSNHEVMKAINDGFRLPTPMDCPSAIYQLMMQCWQQERARRPKFADIVSILDKLIRAPDSLKTLADFDPRVSIRLPSTSGSEGVPFRTVSEWLESIKMQQYTEHFMAAGYTAIEKVVQMTNDDIKRIGVRLPGHQKRIAYSLLGLKDQVNTVGIPI

SEQ ID NO: 208 - protein, 1439 aa, Homo sapiens
MATLACRVQFLDDTDPFNSTNFPEPSRPPLFTFREDLALGTQLAGVHRLLQAPHKLDDCTLQLSHNGAYLDLEATLAEQRDELEGFQDDAGRGKKHSIILRTQLSVRVHACIEKLYNSSGRDLRRALFSLKQIFQDDKDLVHEFVVAEGLTCLIKVGAEADQNYQNYILRALGQIMLYVDGMNGVINRNETIQWLYTLIGSKFRLVVKTALKLLLVFVEYSESNAPLLIQAVTAVDTKRGVKPWSNIMEILEEKDGVDTELLVYAMTLVNKTLSGLPDQDTFYDVVDCLEELGIAAVSQRHLNKKGTDLDLVEQLNIYEVALRHEDGDETTEPPPSGCRDRRRASVCSSGGGEHRGLDRRRSRRHSVQSIKSTLSAPTSPCSQSAPSFKPNQVRDLREKYSNFGNNSYHSSRPSSGSSVPTTPTSSVSPPQEARLERSSPSGLLTSSFRQHQESLAAERERRRQEREERLQRIEREERNKFSRDYLDKREEQRQAREERYKYLEQLAAEEHEKELRSRSVSRGRADLSLDLTSPAAPACLAPLSHSPSSSDSQEALTVSASSPGTPHHPQASAGDPEPESEAEPEAEAGAGQVADEAGQDIASAHEGAETEVEQALEQEPEERASLSEKERQNEGVNERDNCSASSVSSSSSTLEREEKEDKLSRDRTTGLWPAGVQDAGVNGQCGDILTNKRFMLDMLYAHNRKSPDDEEKGDGEAGRTQQEAEAVASLATRISTLQANSQTQDESVRRVDVGCLDNRGSVKAFAEKFNSGDLGRGSISPDAEPNDKVPETAPVQPKTESDYIWDQLMANPRELRIQDMDFTDLGEEDDIDVLDVDLGHREAPGPPPPPPPTFLGLPPPPPPPLLDSIPPPPVPGNLLVPPPPVFNAPQGLGWSQVPRGQPTFTKKKKTIRLFWNEVRPFDWPCKNNRRCREFLWSKLEPIKVDTSRLEHLFESKSKELSVSKKTAADGKRQEIIVLDSKRSNAINIGLTVLPPPRTIKIAILNFDEYALNKEGIEKILTMIPTDEEKQKIQEAQLANPEIPLGSAEQFLLTLSSISELSARLHLWAFKMDYETTEKEVAEPLLDLKEGIDQLENNKTLGFILSTLLAIGNFLNGTNAKAFELSYLEKVPEVKDTVHKQSLLHHVCTMVVENFPDSSDLYSEIGAITRSAKVDFDQLQDNLCQMERRCKASWDHLKAIAKHEMKPVLKQRMSEFLKDCAERIIILKIVHRRIINRFHSFLLFMGHPPYAIREVNINKFCRIISEFALEYRTTRERVLQQKQKRANHRERNKTRGKMITDSGKFSGSSPAPPSQPQGLSYAEDAAEHENMKAVLKTSSPSVEDATPALGVRTRSRASRGSTSSWTMGTDDSPNVTDDAADEIMDRIVKSATQVPSQRVVPRERKRSRANRKSLRRTLKSGLTPEEARALGLVGTSELQL

SEQ ID NO: 209 - protein, 1135 aa, Homo sapiens
MRSRGSDTEGSAQKKFPRHTKGHSFQGPKNMKHRQQDKDSPSESDVILPCPKAEKPHSGNGHQAEDLSRDDLLFLLSILEGELQARDEVIGILKAEKMDLALLEAQYGFVTPKKVLEALQRDAFQAKSTPWQEDIYEKPMNELDKVVEKHKESYRRILGQLLVAEKSRRQTILELEEEKRKHKEYMEKSDEFICLLEQECERLKKLIDQEIKSQEEKEQEKEKRVTTLKEELTKLKSFALMVVDEQQRLTAQLTLQRQKIQELTTNAKETHTKLALAEARVQEEEQKATRLEKELQTQTTKFHQDQDTIMAKLTNEDSQNRQLQQKLAALSRQIDELEETNRSLRKAEEELQDIKEKISKGEYGNAGIMAEVEELRKRVLDMEGKDEELIKMEEQCRDLNKRLERETLQSKDFKLEVEKLSKRIMALEKLEDAFNKSKQECYSLKCNLEKERMTTKQLSQELESLKVRIKELEAIESRLEKTEFTLKEDLTKLKTLTVMFVDERKTMSEKLKKTEDKLQAASSQLQVEQNKVTTVTEKLIEETKRALKSKTDVEEKMYSVTKERDDLKNKLKAEEEKGNDLLSRVNMLKNRLQSLEAIEKDFLKNKLNQDSGKSTTALHQENNKIKELSQEVERLKLKLKDMKAIEDDLMKTEDEYETLERRYANERDKAQFLSKELEHVKMELAKYKLAEKTETSHEQWLFKRLQEEEAKSGHLSREVDALKEKIHEYMATEDLICHLQGDHSVLQKKLNQQENRNRDLGREIENLTKELERYRHFSKSLRPSLNGRRISDPQVFSKEVQTEAVDNEPPDYKSLIPLERAVINGQLYEESENQDEDPNDEGSVLSFKCSQSTPCPVNRKLWIPWMKSKEGHLQNGKMQTKPNANFVQPGDLVLSHTPGQPLHIKVTPDHVQNTATLEITSPTTESPHSYTSTAVIPNCGTPKQRITILQNASITPVKSKTSTEDLMNLEQGMSPITMATFARAQTPESCGSLTPERTMSPIQVLAVTGSASSPEQGRSPEPTEISAKHAIFRVSPDRQSSWQFQRSNSNSSSVITTEDNKIHIHLGSPYMQAVASPVRPASPSAPLQDNRTQGLINGALNKTTNKVTSSITITPTATPLPRQSQITVEPLLLPH

SEQ ID NO: 210 - protein, 515 aa, Homo sapiens
MGSLSSRVLRQPRPALAQQAQGARAGGSARRPDTGDDAAGHGFCYCAGSHKRKRSSGSFCYCHPDSETDEDEEEGDEQQRLLNTPRRKKLKSTSKYIYQTLFLNGENSDIKICALGEEWSLHKIYLCQSGYFSSMFSGSWKESSMNIIELEIPDQNIDVEALQVAFGSLYRDDVLIKPSRVVAILAAACLLQLDGLIQQCGETMKETVNVKTVCGYYTSAGTYGLDSVKKKCLEWLLNNLMTHQNVELFKELSINVMKQLIGSSNLFVMQVEMDIYTALKKWMFLQLVPSWNGSLKQLLTETDVWFSKQRKDFEGMAFLETEQGKPFVSVFRHLRLQYIISDLASARIIEQDAVVPSEWLSSVYKQQWFAMLRAEQDSEVGPQEINKEELEGNSMRCGRKLAKDGEYCWRWTGFNFGFDLLVTYTNRYIIFKRNTLNQPCSGSVSLQPRRSIAFRLRLASFDSSGKLICSRTTGYQILTLEKDQEQVVMNLDSRLLIFPLYICCNFLYISPEKKN

SEQ ID NO: 211 - protein, 374 aa, Homo sapiens
MAASAAAAELQASGGPRHPVCLLVLGMAGSGKTTFVQRLTGHLHAQGTPPYVINLDPAVHEVPFPANIDIRDTVKYKEVMKQYGLGPNGGIVTSLNLFATRFDQVMKFIEKAQNMSKYVLIDTPGQIEVFTWSASGTIITEALASSFPTVVIYVMDTSRSTNPVTFMSNMLYACSILYKTKLPFIVVMNKTDIIDHSFAVEWMQDFEAFQDALNQETTYVSNLTRSMSLVLDEFYSSLRVVGVSAVLGTGLDELFVQVTSAAEEYEREYRPEYERLKKSLANAESQQQREQLERLRKDMGSVALDAGTAKDSLSPVLHPSDLILTRGTLDEEDEEADSDTDDIDHRVTEESHEEPAFQNFMQESMAQYWKRNNK

SEQ ID NO: 212 - protein, 873 aa, Homo sapiens
MTTRKLSAHSAATPGYKAVTHKHHTGWARMAKTGLPEKGQSQAGGESGSGQLLDQENGAGESALVSVYVHLDFPDKTWPPELSRTLTLPAASASSSPRPLLTGLRLTTGEYMSCFEAQGFKWNLYEVVRVPLKATDVARLPYQLSISCATSPGFQLSCCIPSTNLAYTAAWSPGEGSKASSFNESGSQCFVLAVQRCPMADTTYACDLQSLGLAPLRVPISITIIQDGDITCPEDASVLTWNVTKAGHVAQAPCPESKRGIVRRLCGADGVWGPVHSSCTDARLLALFTRTKLLQAGQGSPAEEVPQILAQLPGQAAEASSPSDLLTLLSTMKYVAKVVAEARIQLDRRALKNLLIATDKVLDMDTRSLWTLAQARKPWAGSTLLLAVETLACSLCPQDHPFAFSLPNVLLQSQLFGPTFPADYSISFPTRPPLQAQIPRHSLAPLVRNGTEISITSLVLRKLDHLLPSNYGQGLGDSLYATPGLVLVISIMAGDRAFSQGEVIMDFGNTDGSPHCVFWDHSLFQGRGGWSKEGCQAQVASASPTAQCLCQHLTAFSVLMSPHTVPEEPALALLTQVGLGASILALLVCLGVYWLVWRVVVRNKISYFRHAALLNMVFCLLAADTCFLGAPFLSPGPRSPLCLAAAFLCHFLYLATFFWMLAQALVLAHQLLFVFHQLAKHRVLPLMVLLGYLCPLGLAGVTLGLYLPQGQYLREGECWLDGKGGALYTFVGPVLAIIGVNGLVLAMAMLKLLRPSLSEGPPAEKRQALLGVIKALLILTPIFGLTWGLGLATLLEEVSTVPHYIFTILNTLQGVFILLFGCLMDRKIQEALRKRFCRAQAPSSTISLATNEGCILEHSKGGSDTARKTDASE

SEQ ID NO: 213 - skipped

SEQ ID NO: 214 - protein, 763 aa, Homo sapiens
MVACRAIGILSRFSAFRILRSRGYICRNFTGSSALLTRTHINYGVKGDVAVVRINSPNSKVNTLSKELHSEFSEVMNEIWASDQIRSAVLISSKPGCFIAGADINMLAACKTLQEVTQLSQEAQRIVEKLEKSTKPIVAAINGSCLGGGLEVAISCQYRIATKDRKTVLGTPEVLLGALPGAGGTQRLPKMVGVPAALDMMLTGRSIRADRAKKMGLVDQLVEPLGPGLKPPEERTIEYLEEVAITFAKGLADKKISPKRDKGLVEKLTAYAMTIPFVRQQVYKKVEEKVRKQTKGLYPAPLKIIDVVKTGIEQGSDAGYLCESQKFGELVMTKESKALMGLYHGQVLCKKNKFGAPQKDVKHLAILGAGLMGAGIAQVSVDKGLKTILKDATLTALDRGQQQVFKGLNDKVKKKALTSFERDSIFSNLTGQLDYQGFEKADMVIEAVFEDLSLKHRVLKEVEAVIPDHCIFASNTSALPISEIAAVSKRPEKVIGMHYFSPVDKMQLLEIITTEKTSKDTSASAVAVGLKQGKVIIVVKDGPGFYTTRCLAPMMSEVIRILQEGVDPKKLDSLTTSFGFPVGAATLVDEVGVDVAKHVAEDLGKVFGERFGGGNPELLTQMVSKGFLGRKSGKGFYIYQEGVKRKDLNSDMDSILASLKLPPKSEVSSDEDIQFRLVTRFVNEAVMCLQEGILATPAEGDIGAVFGLGFPPCLGGPFRFVDLYGAQKIVDRLKKYEAAYGKQFTPCQLLADHANSPNKKFYQ

SEQ ID NO: 215 - protein, 392 aa, Homo sapiens
MQSPAVLVTSRRLQNAHTGLDLTVPQHQEVRGKMMSGHVEYQILVVTRLAAFKSAKHRPEDVVQFLVSKKYSEIEEFYQKLSSRYAAASLPPLPRKVLFVGESDIRERRAVFNEILRCVSKDAELAGSPELLEFLGTRSPGAAGLTSRDSSVLDGTDSQTGNDEEAFDFFEEQDQVAEEGPPVQSLKGEDAEESLEEEEALDPLGIMRSKKPKKHPKVAVKAKPSPRLTIFDEEVDPDEGLFGPGRKLSPQDPSEDVSSVDPLKLFDDPDLGGAIPLGDSLLLPAACESGGPTPSLSHRDASKELFRVEEDLDQILNLGAEPKPKPQLKPKPPVAAKPVIPRKPAVPPKAGPAEAVAGQQKPQEQIQAMDEMDILQYIQDHDTPAQAAPSLF

SEQ ID NO: 216 - protein, 658 aa, Homo sapiens
MKLYCLSGHPTLPCNVLKFKSTTIMLDCGLDMTSTLNFLPLPLVQSPRLSNLPGWSLKDGNAFLDKELKECSGHVFVDSVPEFCLPETELIDLSTVDVILISNYHCMMALPYITEHTGFTGTVYATEPTVQIGRLLMEELVNFIERVPKAQSASLWKNKDIQRLLPSPLKDAVEVSTWRRCYTMQEVNSALSKIQLVGYSQKIELFGAVQVTPLSSGYALGSSNWIIQSHYEKVSYVSGSSLLTTHPQPMDQASLKNSDVLVLTGLTQIPTANPDGMVGEFCSNLALTVRNGGNVLVPCYPSGVIYDLLECLYQYIDSAGLSSVPLYFISPVANSSLEFSQIFAEWLCHNKQSKVYLPEPPFPHAELIQTNKLKHYPSIHGDFSNDFRQPCVVFTGHPSLRFGDVVHFMELWGKSSLNTVIFTEPDFSYLEALAPYQPLAMKCIYCPIDTRLNFIQVSKLLKEVQPLHVVCPEQYTQPPPAQSHRMDLMIDCQPPAMSYRRAEVLALPFKRRYEKIEIMPELADSLVPMEIKPGISLATVSAVLHTKDNKHLLQPPPRPAQPTSGKKRKRVSDDVPDCKVLKPLLSGSIPVEQFVQTLEKHGFSDIKVEDTAKGHIVLLQEAETLIQIEEDSTHIICDNDEMLRVRLRDLVLKFLQKF

SEQ ID NO: 217 - protein, 1073 aa, Homo sapiens
MAAAGQLCLLYLSAGLLSRLGAAFNLDTREDNVIRKYGDPGSLFGFSLAMHWQLQPEDKRLLLVGAPRAEALPLQRANRTGGLYSCDITARGPCTRIEFDNDADPTSESKEDQWMGVTVQSQGPGGKVVTCAHRYEKRQHVNTKQESRDIFGRCYVLSQNLRIEDDMDGGDWSFCDGRLRGHEKFGSCQQGVAATFTKDFHYIVFGAPGTYNWKGIVRVEQKNNTFFDMNIFEDGPYEVGGETEHDESLVPVPANSYLGFSLDSGKGIVSKDEITFVSGAPRANHSGAVVLLKRDMKSAHLLPEHIFDGEGLASSFGYDVAVVDLNKDGWQDIVIGAPQYFDRDGEVGGAVYVYMNQQGRWNNVKPIRLNGTKDSMFGIAVKNIGDINQDGYPDIAVGAPYDDLGKVFIYHGSANGINTKPTQVLKGISPYFGYSIAGNMDLDRNSYPDVAVGSLSDSVTIFRSRPVINIQKTITVTPNRIDLRQKTACGAPSGICLQVKSCFEYTANPAGYNPSISIVGTLEAEKERRKSGLSSRVQFRNQGSEPKYTQELTLKRQKQKVCMEETLWLQDNIRDKLRPIPITASVEIQEPSSRRRVNSLPEVLPILNSDEPKTAHIDVHFLKEGCGDDNVCNSNLKLEYKFCTREGNQDKFSYLPIQKGVPELVLKDQKDIALEITVTNSPSNPRNPTKDGDDAHEAKLIATFPDTLTYSAYRELRAFPEKQLSCVANQNGSQADCELGNPFKRNSNVTFYLVLSTTEVTFDTPDLDINLKLETTSNQDNLAPITAKAKVVIELLLSVSGVAKPSQVYFGGTVVGEQAMKSEDEVGSLIEYEFRVINLGKPLTNLGTATLNIQWPKEISNGKWLLYLVKVESKGLEKVTCEPQKEINSLNLTESHNSRKKREITEKQIDDNRKFSLFAERKYQTLNCSVNVNCVNIRCPLRGLDSKASLILRSRLWNSTFLEEYSKLNYLDILMRAFIDVTAAAENIRLPNAGTQVRVTVFPSKTVAQYSGVPWWIILVAILAGILMLALLVFILWKCGFFKRNKKDHYDATYHKAEIHAQPSDKERLTSDA

SEQ ID NO: 218 - protein, 426 aa, Homo sapiens
MEGHKAEEEVLDVLRLNVGGCIYTARRESLCRFKDSMLASMFSGRFPLKTDESGACVIDRDGRLFKYLLDYLHGEVQIPTDEQTRIALQEEADYFGIPYPYSLSDHLANEMETYSLRSNIELKKALTDFCDSYGLVCNKPTVWVLHYLNTSGASCESRIIGVYATKTDGTDAIEKQLGGRIHSKGIFKREAGNNVQYIWSYYSVAELKKMMDAFDAWEGKGVSYWRVPHELIECWTLEERPLLGSLRHMAPIRKRRLITFNEADESVNYKTGPKPVRFLGPSTSTQIKVKNSASVTVSPASAIQTSAGATANRFQSGSRRKAAQRSAPSRATALVGTGAPGHPQASPGAASAENGGTHLPPAKVLLSDKKPTPQRVIKLKRTPLCATAPCLPSPTATRQANSLKPLPGEAARALGVRTENGKNKGN

SEQ ID NO: 219 - protein, 957 aa, Homo sapiens
MADPAECSIKVMCRFRPLNEAEILRGDKFIPKFKGDETVVIGQGKPYVFDRVLPPNTTQEQVYNACAKQIVKDVLEGYNGTIFAYGQTSSGKTHTMEGKLHDPQLMGIIPRIAHDIFDHIYSMDENLEFHIKVSYFEIYLDKIRDLLDVSKTNLAVHEDKNRVPYVKGCTERFVSSPEEVMDVIDEGKANRHVAVTNMNEHSSRSHSIFLINIKQENVETEKKLSGKLYLVDLAGSEKVSKTGAEGAVLDEAKNINKSLSALGNVISALAEGTKTHVPYRDSKMTRILQDSLGGNCRTTIVICCSPSVFNEAETKSTLMFGQRAKTIKNTVSVNLELTAEEWKKKYEKEKEKNKTLKNVIQHLEMELNRWRNGEAVPEDEQISAKDQKNLEPCDNTPIIDNIAPVVAGISTEEKEKYDEEISSLYRQLDDKDDEINQQSQLAEKLKQQMLDQDELLASTRRDYEKIQEELTRLQIENEAAKDEVKEVLQALEELAVNYDQKSQEVEDKTRANEQLTDELAQKTTTLTTTQRELSQLQELSNHQKKRATEILNLLLKDLGEIGGIIGTNDVKTLADVNGVIEEEFTMARLYISKMKSEVKSLVNRSKQLESAQMDSNRKMNASERELAACQLLISQHEAKIKSLTDYMQNMEQKRRQLEESQDSLSEELAKLRAQEKMHEVSFQDKEKEHLTRLQDAEEMKKALEQQMESHREAHQKQLSRLRDEIEEKQKIIDEIRDLNQKLQLEQEKLSSDYNKLKIEDQEREMKLEKLLLLNDKREQAREDLKGLEETVSRELQTLHNLRKLFVQDLTTRVKKSVELDNDDGGGSAAQKQKISFLENNLEQLTKVHKQLVRDNADLRCELPKLEKRLRATAERVKALESALKEAKENAMRDRKRYQQEVDRIKEAVRAKNMARRAHSAQIAKPIRPGHYPASSPTAVHAIRGGGGSSSNSTHYQK

SEQ ID NO: 220 - protein, 619 aa, Homo sapiens
MSGLVLGQRDEPAGHRLSQEEILGSTRLVSQGLEALRSEHQAVLQSLSQTIECLQQGGHEEGLVHEKARQLRRSMENIELGLSEAQVMLALASHLSTVESEKQKLRAQVRRLCQENQWLRDELAGTQQRLQRSEQAVAQLEEEKKHLEFLGQLRQYDEDGHTSEEKEGDATKDSLDDLFPNEEEEDPSNGLSRGQGATAAQQGGYEIPARLRTLHNLVIQYAAQGRYEVAVPLCKQALEDLERTSGRGHPDVATMLNILALVYRDQNKYKEAAHLLNDALSIRESTLGPDHPAVAATLNNLAVLYGKRGKYKEAEPLCQRALEIREKVLGTNHPDVAKQLNNLALLCQNQGKYEAVERYYQRALAIYEGQLGPDNPNVARTKNNLASCYLKQGKYAEAETLYKEILTRAHVQEFGSVDDDHKPIWMHAEEREEMSKSRHHEGGTPYAEYGGWYKACKVSSPTVNTTLRNLGALYRRQGKLEAAETLEECALRSRRQGTDPISQTKVAELLGESDGRRTSQEGPGDSVKFEGGEDASVAVEWSGDGSGTLQRSGSLGKIRDVLRRSSELLVRKLQGTEPRPSSSNMKRAASLNYLNQPSAAPLQVSRGLSASTMDLSSSS

SEQ ID NO: 221 - protein, 721 aa, Homo sapiens
MGTPASGRKRTPVKDRFSAEDEALSNIAREAEARLAAKRAARAEARDIRMRELERQQKEYSLHSFDRKWGQIQKWLEDSERARYSHRSSHHRPYLGVEDALSIRSVGSHRYDMFKDRSSRLSSLNHSYSHSHGMKKRSSDSHKDLLSGLYFDQRNYSSLRHSKPTSAYYTRQSSSLYSDPLATYKSDRASPTANSGLLRSASLASLYNGGLYNPYGPRTPSECSYYSSRISSARSSPGFTNDDTASIVSSDRASRGRRESVVSAADYFSRSNRRGSVVSEVDDISIPDLSSLDEKSDKQYAENYTRPSSRNSASATTPLSGNSSRRGSGDTSSLIDPDTSLSELRDIYDLKDQIQDVEGRYMQGLKELKESLSEVEEKYKKAMVSNAQLDNEKNNLIYQVDTLKDVIEEQEEQMAEFYRENEEKSKELERQKHMCSVLQHKMEELKEGLRQRDELIEEKQRMQQKIDTMTKEVFDLQETLLWKDKKIGALEKQKEYIACLRNERDMLREELADLQETVKTGEKHGLVIIPDGTPNGDVSHEPVAGAITVVSQEAAQVLESAGEGPLDVRLRKLAGEKEELLSQIRKLKLQLEEERQKCSRNDGTVGDLAGLQNGSDLQFIEMQRDANRQISEYKFKLSKAEQDITTLEQSISRLEGQVLRYKTAAENAEKVEDELKAEKRKLQRELRTALDKIEEMEMTNSHLAKRLEKMKANRTALLAQQ

SEQ ID NO: 222 - protein, 148 aa, Homo sapiens
MAVASDFYLRYYVGHKGKFGHEFLEFEFRPDGKLRYANNSNYKNDVMIRKEAYVHKSVMEELKRIIDDSEITKEDDALWPPPDRVGRQELEIVIGDEHISFTTSKIGSLIDVNQSKDPEGLRVFYYLVQDLKCLVFSLIGLHFKIKPI

SEQ ID NO: 223 - protein, 1137 aa, Homo sapiens
MPLSSHLLPALVLFLAGSSGWAWVPNHCRSPGQAVCNFVCDCRDCSDEAQCGYHGASPTLGAPFACDFEQDPCGWRDISTSGYSWLRDRAGAALEGPGPHSDHTLGTDLGWYMAVGTHRGKEASTAALRSPTLREAASSCKLRLWYHAASGDVAELRVELTHGAETLTLWQSTGPWGPGWQELAVTTGRIRGDFRVTFSATRNATHRGAVALDDLEFWDCGLPTPQANCPPGHHHCQNKVCVEPQQLCDGEDNCGDLSDENPLTCGRHIATDFETGLGPWNRSEGWSRNHRAGGPERPSWPRRDHSRNSAQGSFLVSVAEPGTPAILSSPEFQASGTSNCSLVFYQYLSGSEAGCLQLFLQTLGPGAPRAPVLLRRRRGELGTAWVRDRVDIQSAYPFQILLAGQTGPGGVVGLDDLILSDHCRPVSEVSTLQPLPPGPRAPAPQPLPPSSRLQDSCKQGHLACGDLCVPPEQLCDFEEQCAGGEDEQACGTTDFESPEAGGWEDASVGRLQWRRVSAQESQGSSAAAAGHFLSLQRAWGQLGAEARVLTPLLGPSGPSCELHLAYYLQSQPREVSCNFERDTCSWYPGHLSDTHWRWVESRGPDHDHTTGQGHFVLLDPTDPLAWGHSAHLLSRPQVPAAPTECLSFWYHLHGPQIGTLRLAMRREGEETHLWSRSGTQGNRWHEAWATLSHQPGSHAQYQLLFEGLRDGYHGTMALDDVAVRPGPCWAPNYCSFEDSDCGFSPGGQGLWRRQANASGHAAWGPPTDHTTETAQGHYMVVDTSPDALPRGQTASLTSKEHRPLAQPACLTFWYHGSLRSPGTLRVYLEERGRHQVLSLSAHGGLAWRLGSMDVQAERAWRVVFEAVAAGVAHSYVALDDLLLQDGPCPQPGSCDFESGLCGWSHLAWPGLGGYSWDWGGGATPSRYPQPPVDHTLGTEAGHFAFFETGVLGPGGRAAWLRSEPLPATPASCLRFWYHMGFPEHFYKGELKVLLHSAQGQLAVWGAGGHRRHQWLEAQVEVASAKEFQIVFEATLGGQPALGPIALDDVEYLAGQHCQQPAPSPGNTAAPGSVPAVVGSALLLLMLLVLLGLGGRRWLQKKGSCPFQSNTEATAPGFDNILFNADGVTLPASVTSDP

SEQ ID NO: 224 - protein, 879 aa, Homo sapiens
MRLHLLLLLALCGAGTTAAELSYSLRGNWSICNGNGSLELPGAVPGCVHSALFQQGLIQDSYYRFNDLNYRWVSLDNWTYSKEFKIPFEISKWQKVNLILEGVDTVSKILFNEVTIGETDNMFNRYSFDITNVVRDVNSIELRFQSAVLYAAQQSKAHTRYQVPPDCPPLVQKGECHVNFVRKEQCSFSWDWGPSFPTQGIWKDVRIEAYNICHLNYFTFSPIYDKSAQEWNLEIESTFDVVSSKPVGGQVIVAIPKLQTQQTYSIELQPGKRIVELFVNISKNITVETWWPHGHGNQTGYNMTVLFELDGGLNIEKSAKVYFRTVELIEEPIKGSPGLSFYFKINGFPIFLKGSNWIPADSFQDRVTSELLRLLLQSVVDANMNTLRVWGGGIYEQDEFYELCDELGIMVWQDFMFACALYPTDQGFLDSVTAEVAYQIKRLKSHPSIIIWSGNNENEEALMMNWYHISFTDRPIYIKDYVTLYVKNIRELVLAGDKSRPFITSSPTNGAETVAEAWVSQNPNSNYFGDVHFYDYISDCWNWKVFPKARFASEYGYQSWPSFSTLEKVSSTEDWSFNSKFSLHRQHHEGGNKQMLYQAGLHFKLPQSTDPLRTFKDTIYLTQVMQAQCVKTETEFYRRSRSEIVDQQGHTMGALYWQLNDIWQAPSWASLEYGGKWKMLHYFAQNFFAPLLPVGFENENTFYIYGVSDLHSDYSMTLSVRVHTWSSLEPVCSRVTERFVMKGGEAVCLYEEPVSELLRRCGNCTRESCVVSFYLSADHELLSPTNYHFLSSPKEAVGLCKAQITAIISQQGDIFVFDLETSAVAPFVWLDVGSIPGRFSDNGFLMTEKTRTILFYPWEPTSKNELEQSFHVTSLTDIY

SEQ ID NO: 225 - protein, 1118 aa, Homo sapiens
MEPSRALLGCLASAAAAAPPGEDGAGAGAEEEEEEEEEAAAAVGPGELGCDAPLPYWTAVFEYEAAGEDELTLRLGDVVEVLSKDSQVSGDEGWWTGQLNQRVGIFPSNYVTPRSAFSSRCQPGGEDPSCYPPIQLLEIDFAELTLEEIIGIGGFGKVYRAFWIGDEVAVKAARHDPDEDISQTIENVRQEAKLFAMLKHPNIIALRGVCLKEPNLCLVMEFARGGPLNRVLSGKRIPPDILVNWAVQIARGMNYLHDEAIVPIIHRDLKSSNILILQKVENGDLSNKILKITDFGLAREWHRTTKMSAAGTYAWMAPEVIRASMFSKGSDVWSYGVLLWELLTGEVPFRGIDGLAVAYGVAMNKLALPIPSTCPEPFAKLMEDCWNPDPHSRPSFTNILDQLTTIEESGFFEMPKDSFHCLQDNWKHEIQEMFDQLRAKEKELRTWEEELTRAALQQKNQEELLRRREQELAEREIDILERELNIIIHQLCQEKPRVKKRKGKFRKSRLKLKDGNRISLPSDFQHKFTVQASPTMDKRKSLINSRSSPPASPTIIPRLRAIQLTPGESSKTWGRSSVVPKEEGEEEEKRAPKKKGRTWGPGTLGQKELASGDEGSPQRREKANGLSTPSESPHFHLGLKSLVDGYKQWSSSAPNLVKGPRSSPALPGFTSLMEMALLAASWVVPIDIEEDEDSEGPGSGESRLQHSPSQSYLCIPFPRGEDGDGPSSDGIHEEPTPVNSATSTPQLTPTNSLKRGGAHHRRCEVALLGCGAVLAATGLGFDLLEAGKCQLLPLEEPEPPAREEKKRREGLFQRSSRPRRSTSPPSRKLFKKEEPMLLLGDPSASLTLLSLSSISECNSTRSLLRSDSDEIVVYEMPVSPVEAPPLSPCTHNPLVNVRVERFKRDPNQSLTPTHVTLTTPSQPSSHRRTPSDGALKPETLLASRSPSSNGLSPSPGAGMLKTPSPSRDPGEFPRLPDPNVVFPPTPRRWNTQQDSTLERPKTLEFLPRPRPSANRQRLDPWWFVSPSHARSTSPANSSSTETPSNLDSCFASSSSTVEERPGLPALLPFQAGPLPPTERTLLDLDAEGQSQDSTVPLCRAELNTHRPAPYEIQQEFWS

SEQ ID NO: 226 - protein, 2210 aa, Homo sapiens
MTAAANWVANGASLEDCHSNLFSLAELTGIKWRRYNFGGHGDCGPIISAPAQDDPILLSFIRCLQANLLCVWRRDVKPDCKELWIFWWGDEPNLVGVIHHELQVVEEGLWENGLSYECRTLLFKAIHNLLERCLMDKNFVRIGKWFVRPYEKDEKPVNKSEHLSCAFTFFLHGESNVCTSVEIAQHQPIYLINEEHIHMAQSSPAPFQVLVSPYGLNGTLTGQAYKMSDPATRKLIEEWQYFYPMVLKKKEESKEEDELGYDDDFPVAVEVIVGGVRMVYPSAFVLISQNDIPVPQSVASAGGHIAVGQQGLGSVKDPSNCGMPLTPPTSPEQAILGESGGMQSAASHLVSQDGGMITMHSPKRSGKIPPKLHNHMVHRVWKECILNRTQSKRSQMSTPTLEEEPASNPATWDFVDPTQRVSCSCSRHKLLKRCAVGPNRPPTVSQPGFSAGPSSSSSLPPPASSKHKTAERQEKGDKLQKRPLIPFHHRPSVAEELCMEQDTPGQKLGLAGIDSSLEVSSSRKYDKQMAVPSRNTSKQMNLNPMDSPHSPISPLPPTLSPQPRGQETESLDPPSVPVNPALYGNGLELQQLSTLDDRTVLVGQRLPLMAEVSETALYCGIRPSNPESSEKWWHSYRLPPSDDAEFRPPELQGERCDAKMEVNSESTALQRLLAQPNKRFKIWQDKQPQLQPLHFLDPLPLSQQPGDSLGEVNDPYTFEDGDIKYIFTANKKCKQGTEKDSLKKNKSEDGFGTKDVTTPGHSTPVPDGKNAMSIFSSATKTDVRQDNAAGRAGSSSLTQVTDLAPSLHDLDNIFDNSDDDELGAVSPALRSSKMPAVGTEDRPLGKDGRAAVPYPPTVADLQRMFPTPPSLEQHPAFSPVMNYKDGISSETVTALGMMESPMVSMVSTQLTEFKMEVEDGLGSPKPEEIKDFSYVHKVPSFQPFVGSSMFAPLKMLPSHCLLPLKIPDACLFRPSWAIPPKIEQLPMPPAATFIRDGYNNVPSVGSLADPDYLNTPQMNTPVTLNSAAPASNSGAGVLPSPATPRFSVPTPRTPRTPRTPRGGGTASGQGSVKYDSTDQGSPASTPSTTRPLNSVEPATMQPIPEAHSLYVTLILSDSVMNIFKDRNFDSCCICACNMNIKGADVGLYIPDSSNEDQYRCTCGFSAIMNRKLGYNSGLFLEDELDIFGKNSDIGQAAERRLMMCQSTFLPQVEGTKKPQEPPISLLLLLQNQHTQPFASLNFLDYISSNNRQTLPCVSWSYDRVQADNNDYWTECFNALEQGRQYVDNPTGGKVDEALVRSATVHSWPHSNVLDISMLSSQDVVRMLLSLQPFLQDAIQKKRTGRTWENIQHVQGPLTWQQFHKMAGRGTYGSEESPEPLPIPTLLVGYDKDFLTISPFSLPFWERLLLDPYGGHRDVAYIVVCPENEALLEGAKTFFRDLSAVYEMCRLGQHKPICKVLRDGIMRVGKTVAQKLTDELVSEWFNQPWSGEENDNHSRLKLYAQVCRHHLAPYLATLQLDSSLLIPPKYQTPPAAAQGQATPGNAGPLAPNGSAAPPAGSAFNPTSNSSSTNPAASSSASGSSVPPVSSSASAPGISQISTTSSSGFSGSVGGQNPSTGGISADRTQGNIGCGGDTDPGQSSSQPSQDGQESVTERERIGIPTEPDSADSHAHPPAVVIYMVDPFTYAAEEDSTSGNFWLLSLMRCYTEMLDNLPEHMRNSFILQIVPCQYMLQTMKDEQVFYIQYLKSMAFSVYCQCRRPLPTQIHIKSLTGFGPAASIEMTLKNPERPSPIQLYSPPFILAPIKDKQTELGETFGEASQKYNVLFVGYCLSHDQRWLLASCTDLHGELLETCVVNIALPNRSRRSKVSARKIGLQKLWEWCIGIVQMTSLPWRVVIGRLGRLGHGELKDWSILLGECSLQTISKKLKDVCRMCGISAADSPSILSACLVAMEPQGSFVVMPDAVTMGSVFGRSTALNMQSSQLNTPQDASCTHILVFPTSSTIQVAPANYPNEDGFSPNNDDMFVDLPFPDDMDNDIGILMTGNLHSSPNSSPVPSPGSPSGIGVGSHFQHSRSQGERLLSREAPEELKQQPLALGYFVSTAKAENLPQWFWSSCPQAQNQCPLFLKASLHHHISVAQTDELLPARNSQRVPHPLDSKTTSDVLRFVLEQYNALSWLTCNPATQDRTSCLPVHFVVLTQLYNAIMNIL

SEQ ID NO: 227 - protein, 603 aa, Homo sapiens
MAASCPLPVTPDLPTLRAKLQGLLQFLRDALSISNAHTVDFYTESVWEELVDLPPETVLAALRKSASETEALPSETRPLVEAEWEAGMTDFPKIFCETSQKLVSVEAFALAAKYYSVQNLGICTPFEQLLVALRGNQNQRIGENQKAVEFMNMKKSHEVQAMSELISSIADYYGIKQVIDLGSGKGYLSSFLSLKYGLKVYGIDSSNTNTHGAEERNRKLKKHWKLCHAQSRLDVNGLALKMAKERKVQNKVKNKADTEEVFNNSPTNQEKMPTSAILPDFSGSVISNIRNQMETLHSQPHQEENLCFENSFSLINLLPINAVEPTSSQQIPNRETSEANKERRKMTSKSSESNIYSPLTSFITADSELHDIIKDLEDCLMVGLHTCGDLAPNTLRIFTSNSEIKGVCSVGCCYHLLSEEFENQHKERTQEKWGFPMCHYLKEERWCCGRNARMSACLALERVAAGQGLPTESLFYRAVLQDIIKDCYGITKCDRHVGKIYSKCSSFLDYVRRSLKKLGLDESKLPEKIIMNYYEKYKPRMNELEAFNMLKVVLAPCIETLILLDRLCYLKEQEDIAWSALVKLFDPVKSPRCYAVIALKKQQ

SEQ ID NO: 228 - protein, 904 aa, Homo sapiens
MDRYLLLVIWGEGKFPSAASREAEHGPEVSSGEGTENQPDFTAANVYHLLKRSISASINPEDSTFPACSVGGIPGSKKWFFAVQAIYGFYQFCSSDWQEIHFDTEKDKIEDVLQTNIEECLGAVECFEEEDSNSRESLSLADLYEEAAENLHQLSDKLPAPGRAMVDIILLLSDKDPPKLKDYLPTVGALKHLREWYSAKITIAGNHCEINCQKIAEYLSANVVSLEDLRNVIDSKELWRGKIQIWERKFGFEISFPEFCLKGVTLKNFSTSNLNTDFLAKKIIPSKDKNILPKVFHYYGPALEFVQMIKLSDLPSCYMSDIEFELGLTNSTKQNSVLLLEQISSLCSKVGALFVLPCTISNILIPPPNQLSSRKWKEYIAKKPKTISVPDVEVKGECSSYYLLLQGNGNRRCKATLIHSANQINGSFALNLIHGKMKTKTEEAKLSFPFDLLSLPHFSGEQIVQREKQLANVQVLALEECLKRRKLAKQPETVSVAELKSLLVLTRKHFLDYFDAVIPKMILRKMDKIKTFNILNDFSPVEPNSSSLMETNPLEWPERHVLQNLETFEKTKQKMRTGSLPHSSEQLLGHKEGPRDSITLLDAKELLKYFTSDGLPIGDLQPLPIQKGEKTFVLTPELSPGKLQVLPFEKASVCHYHGIEYCLDDRKALERDGGFSELQSRLIRYETQTTCTRESFPVPTVLSPLPSPVVSSDPGSVPDGEVLQNELRTEVSRLKRRSKDLNCLYPRKRLVKSESSESLLSQTTGNSNHYHHHVTSRKPQTERSLPVTCPLVPIPSCETPKLATKTSSGQKSMHESKTSRQIKESRSQKHTRILKEVVTETLKKHSITETHECFTACSQRLFEISKFYLKDLKTSRGLFEEMKKTANNNAVQVIDWVLEKTSKK

SEQ ID NO: 229 - protein, 1976 aa, Homo sapiens
MAQRTGLEDPERYLFVDRAVIYNPATQADWTAKKLVWIPSERHGFEAASIKEERGDEVMVELAENGKKAMVNKDDIQKMNPPKFSKVEDMAELTCLNEASVLHNLKDRYYSGLIYTYSGLFCVVINPYKNLPIYSENIIEMYRGKKRHEMPPHIYAISESAYRCMLQDREDQSILCTGESGAGKTENTKKVIQYLAHVASSHKGRKDHNIPGELERQLLQANPILESFGNAKTVKNDNSSRFGKFIRINFDVTGYIVGANIETYLLEKSRAVRQAKDERTFHIFYQLLSGAGEHLKSDLLLEGFNNYRFLSNGYIPIPGQQDKDNFQETMEAMHIMGFSHEEILSMLKVVSSVLQFGNISFKKERNTDQASMPENTVAQKLCHLLGMNVMEFTRAILTPRIKVGRDYVQKAQTKEQADFAVEALAKATYERLFRWLVHRINKALDRTKRQGASFIGILDIAGFEIFELNSFEQLCINYTNEKLQQLFNHTMFILEQEEYQREGIEWNFIDFGLDLQPCIDLIERPANPPGVLALLDEECWFPKATDKTFVEKLVQEQGSHSKFQKPRQLKDKADFCIIHYAGKVDYKADEWLMKNMDPLNDNVATLLHQSSDRFVAELWKDVDRIVGLDQVTGMTETAFGSAYKTKKGMFRTVGQLYKESLTKLMATLRNTNPNFVRCIIPNHEKRAGKLDPHLVLDQLRCNGVLEGIRICRQGFPNRIVFQEFRQRYEILTPNAIPKGFMDGKQACERMIRALELDPNLYRIGQSKIFFRAGVLAHLEEERDLKITDIIIFFQAVCRGYLARKAFAKKQQQLSALKVLQRNCAAYLKLRHWQWWRVFTKVKPLLQVTRQEEELQAKDEELLKVKEKQTKVEGELEEMERKHQQLLEEKNILAEQLQAETELFAEAEEMRARLAAKKQELEEILHDLESRVEEEEERNQILQNEKKKMQAHIQDLEEQLDEEEGARQKLQLEKVTAEAKIKKMEEEILLLEDQNSKFIKEKKLMEDRIAECSSQLAEEEEKAKNLAKIRNKQEVMISDLEERLKKEEKTRQELEKAKRKLDGETTDLQDQIAELQAQIDELKLQLAKKEEELQGALARGDDETLHKNNALKVVRELQAQIAELQEDFESEKASRNKAEKQKRDLSEELEALKTELEDTLDTTAAQQELRTKREQEVAELKKALEEETKNHEAQIQDMRQRHATALEELSEQLEQAKRFKANLEKNKQGLETDNKELACEVKVLQQVKAESEHKRKKLDAQVQELHAKVSEGDRLRVELAEKASKLQNELDNVSTLLEEAEKKGIKFAKDAASLESQLQDTQELLQEETRQKLNLSSRIRQLEEEKNSLQEQQEEEEEARKNLEKQVLALQSQLADTKKKVDDDLGTIESLEEAKKKLLKDAEALSQRLEEKALAYDKLEKTKNRLQQELDDLTVDLDHQRQVASNLEKKQKKFDQLLAEEKSISARYAEERDRAEAEAREKETKALSLARALEEALEAKEEFERQNKQLRADMEDLMSSKDDVGKNVHELEKSKRALEQQVEEMRTQLEELEDELQATEDAKLRLEVNMQAMKAQFERDLQTRDEQNEEKKRLLIKQVRELEAELEDERKQRALAVASKKKMEIDLKDLEAQIEAANKARDEVIKQLRKLQAQMKDYQRELEEARASRDEIFAQSKESEKKLKSLEAEILQLQEELASSERARRHAEQERDELADEITNSASGKSALLDEKRRLEARIAQLEEELEEEQSNMELLNDRFRKTTLQVDTLNAELAAERSAAQKSDNARQQLERQNKELKAKLQELEGAVKSKFKATISALEAKIGQLEEQLEQEAKERAAANKLVRRTEKKLKEIFMQVEDERRHADQYKEQMEKANARMKQLKRQLEEAEEEATRANASRRKLQRELDDATEANEGLSREVSTLKNRLRRGGPISFSSSRSGRRQLHLEGASLELSDDDTESKTSDVNETQPPQSE

SEQ ID NO: 230 - protein, 1742 aa, Homo sapiens
MAVAELYTQYNRVWIPDPEEVWKSAEIAKDYRVGDKVLRLLLEDGTELDYSVNPESLPPLRNPDILVGENDLTALSYLHEPAVLHNLRIRFAESKLIYTYSGIILVAMNPYKQLPIYGDAIIHAYSGQNMGDMDPHIFAVAEEAYKQMARNNRNQSIIVSGESGAGKTVSARYAMRYFATVSKSGSNAHVEDKVLASNPITEAVGNAKTTRNDNSSRFGKYTEISFDEQNQIIGANMSTYLLEKSRVVFQSENERNYHIFYQLCASAQQSEFKHLKLGSAEEFNYTRMGGNTVIEGVNDRAEMVETQKTFTLLGFKEDFQMDVFKILAAILHLGNVQITAVGNERSSVSEDDSHLKVFCELLGLESGRVAQWLCNRKIVTSSETVVKPMTRPQAVNARDALAKKIYAHLFDFIVERINQALQFSGKQHTFIGVLDIYGFETFDVNSFEQFCINYANEKLQQQFNMHVFKLEQEEYMKEDIPWTLIDFYDNQPVIDLIEAKMGILELLDEECLLPHGTDENWLQKLYNNFVNRNPLFEKPRMSNTSFVIQHFADKVEYKCEGFLEKNRDTVYDMLVEILRASKFHLCANFFQENPTPPSPFGSMITVKSAKQVIKPNSKHFRTTVGSKFRSSLYLLMETLNATTPHYVRCIKPNDEKLPFEFDSKRIVQQLRACGVLETIRISAQSYPSRWTYIEFYSRYGILMTKQELSFSDKKEVCKVVLHRLIQDSNQYQFGKTKIFFRAGQVAYLEKLRLDKLRQSCVMVQKHMRGWLQRKKFLRERRAALIIQQYFRGQQTVRKAITAVALKEAWAAIIIQKHCRGYLVRSLYQLIRMATITMQAYSRGFLARRRYRKMLEEHKAVILQKYARAWLARRRFQSIRRFVLNIQLTYRVQRLQKKLEDQNKENHGLVEKLTSLAALRAGDVEKIQKLEAELEKAATHRRNYEEKGKRYRDAVEEKLAKLQKHNSELETQKEQIQLKLQEKTEELKEKMDNLTKQLFDDVQKEERQRMLLEKSFELKTQDYEKQIQSLKEEIKALKDEKMQLQHLVEGEHVTSDGLKAEVARLSKQVKTISEFEKEIELLQAQKIDVEKHVQSQKREMREKMSEITKQLLESYDIEDVRSRLSVEDLEHLNEDGELWFAYEGLKKATRVLESHFQSQKDCYEKEIEALNFKVVHLSQEINHLQKLFREENDINESIRHEVTRLTSENMMIPDFKQQISELEKQKQDLEIRLNEQAEKMKGKLEELSNQLHRSQEEEGTQRKALEAQNEIHTKEKEKLIDKIQEMQEASDHLKKQFETESEVKCNFRQEASRLTLENRDLEEELDMKDRVIKKLQDQVKTLSKTIGKANDVHSSSGPKEYLGMLQYKREDEAKLIQNLILDLKPRGVVVNMIPGLPAHILFMCVRYADSLNDANMLKSLMNSTINGIKQVVKEHLEDFEMLSFWLSNTCHFLNCLKQYSGEEEFMKHNSPQQNKNCLNNFDLSEYRQILSDVAIRIYHQFIIIMEKNIQPIIVPGMLEYESLQGISGLKPTGFRKRSSSIDDTDGYTMTSVLQQLSYFYTTMCQNGLDPELVRQAVKQLFFLIGAVTLNSLFLRKDMCSCRKGMQIRCNISYLEEWLKDKNLQNSLAKETLEPLSQAAWLLQVKKTTDSDAKEIYERCTSLSAVQIIKILNSYTPIDDFEKRVTPSFVRKVQALLNSREDSSQLMLDTKYLFQVTFPFTPSPHALEMIQIPSSFKLGFLNRL

SEQ ID NO: 231 - protein, 498 aa, Homo sapiens
MYSPLCLTQDEFHPFIEALLPHVRAFAYTWFNLQARKRKYFKKHEKRMSKEEERAVKDELLSEKPEVKQKWASRLLAKLRKDIRPEYREDFVLTVTGKKPPCCVLSNPDQKGKMRRIDCLRQADKVWRLDLVMVILFKGIPLESTDGERLVKSPQCSNPGLCVQPHHIGVSVKELDLYLAYFVHAADSSQSESPSQPSDADIKDQPENGHLGFQDSFVTSGVFSVTELVRVSQTPIAAGTGPNFSLSDLESSSYYSMSPGAMRRSLPSTSSTSSTKRLKSVEDEMDSPGEEPFYTGQGRSPGSGSQSSGWHEVEPGMPSPTTLKKSEKSGFSSPSPSQTSSLGTAFTQHHRPVITGPRASPHATPSTLHFPTSPIIQQPGPYFSHPAIRYHPQETLKEFVQLVCPDAGQQAGQVGFLNPNGSSQGKVHNPFLPTPMLPPPPPPPMARPVPLPVPDTKPPTTSTEGGAASPTSPILVPGIKVAASHHPPDRPPDPFSTL

SEQ ID NO: 232 - protein, 142 aa, Homo sapiens
MESARENIDLQPGSSDPRSQPINLNHYATKKSVAESMLDVALFMSNAMRLKAVLEQGPSSHYYTTLVTLISLSLLLQVVIGVLLVVIARLNLNEVEKQWRLNQLNNAATILVFFTVVINVFITAFGAHKTGFLAARASRNPL

SEQ ID NO: 233 - protein, 418 aa, Homo sapiens
MDSSAAPTNASNCTDALAYSSCSPAPSPGSWVNLSHLDGNLSDPCGPNRTDLGGRDSLCPPTGSPSMITAITIMALYSIVCVVGLFGNFLVMYVIVRYTKMKTATNIYIFNLALADALATSTLPFQSVNYLMGTWPFGTILCKIVISIDYYNMFTSIFTLCTMSVDRYIAVCHPVKALDFRTPRNAKIINVCNWILSSAIGLPVMFMATTKYRQGSIDCTLTFSHPTWYWENLLKICVFIFAFIMPVLIITVCYGLMILRLKSVRMLSGSKEKDRNLRRITRMVLVVVAVFIVCWTPIHIYVIIKALVTIPETTFQTVSWHFCIALGYTNSCLNPVLYAFLDENFKRCFREFCIPTSSNIEQQNSTRIRQNTRDHPSTANTVDRTNHQPPLAVSMAQIFTRYPPPTHREKTCNDYMKR

SEQ ID NO: 234 - protein, 354 aa, Homo sapiens
MMSYLKQPPYGMNGLGLAGPAMDLLHPSVGYPATPRKQRRERTTFTRSQLDVLEALFAKTRYPDIFMREEVALKINLPESRVQVWFKNRRAKCRQQQQSGSGTKSRPAKKKSSPVRESSGSESSGQFTPPAVSSSASSSSSASSSSANPAAAAAAGLGGNPVAAASSLSTPAASSIWSPASISPGSAPASVSVPEPLAAPSNTSCMQRSVAAGAATAAASYPMSYGQGGSYGQGYPTPSSSYFGGVDCSSYLAPMHSHHHPHQLSPMAPSSMAGHHHHHPHAHHPLSQSSGHHHHHHHHHHQGYGGSGLAFNSADCLDYKEPGAAAASSAWKLNFNSPDCLDYKDQASWRFQVL

SEQ ID NO: 235 - protein, 273 aa, Homo sapiens
MAFLAGPRLLDWASSPPHLQFNKFVLTGYRPASSGSGCLRSLFYLHNELGNIYTHGLALLGFLVLVPMTMPWGQLGKDGWLGGTHCVACLAPPAGSVLYHLFMCHQGGSAVYARLLALDMCGVCLVNTLGALPIIHCTLACRPWLRPAALVGYTVLSGVAGWRALTAPSTSARLRAFGWQAAARLLVFGARGVGLGSGAPGSLPCYLRMDALALLGGLVNVARLPERWGPGRFDYWGNSHQIMHLLSVGSILQLHAGVVPDLLWAAHHACPRD

SEQ ID NO: 236 - protein, 212 aa, Homo sapiens
MRMTMEEMKNEAETTSMVSMPLYAVMYPVFNELERVNLSAAQTLRAAFIKAEKENPGLTQDIIMKILEKKSVEVNFTESLLRMAADDVEEYMIERPEPEFQDLNEKARALKQILSKIPDEINDRVRFLQTIKDIASAIKELLDTVNNVFKKYQYQNRRALEHQKKEFVKYSKSFSDTLKTYFKDGKAINVFVSANRLIHQTNLILQTFKTVA

SEQ ID NO: 237 - protein, 1141 aa, Homo sapiens
MAVPGDAARVRDKPVHSGVSQAPTAGRDCHHRADPASPRDSGCRGCWGDLVLQPLRSSRKLSSALCAGSLSFLLALLVRLVRGEVGCDLEQCKEAAAAEEEEAAPGAEGGVFPGPRGGAPGGGARLSPWLQPSALLFSLLCAFFWMGLYLLRAGVRLPLAVALLAACCGGEALVQIGLGVGEDHLLSLPAAGVVLSCLAAATWLVLRLRLGVLMIALTSAVRTVSLISLERFKVAWRPYLAYLAGVLGILLARYVEQILPQSAEAAPREHLGSQLIAGTKEDIPVFKRRRRSSSVVSAEMSGCSSKSHRRTSLPCIPREQLMGHSEWDHKRGPRGSQSSGTSITVDIAVMGEAHGLITDLLADPSLPPNVCTSLRAVSNLLSTQLTFQAIHKPRVNPVTSLSENYTCSDSEESSEKDKLAIPKRLRRSLPPGLLRRVSSTWTTTTSATGLPTLEPAPVRRDRSTSIKLQEAPSSSPDSWNNPVMMTLTKSRSFTSSYAISAANHVKAKKQSRPGALAKISPLSSPCSSPLQGTPASSLVSKISAVQFPESADTTAKQSLGSHRALTYTQSAPDLSPQILTPPVICSSCGRPYSQGNPADEPLERSGVATRTPSRTDDTAQVTSDYETNNNSDSSDIVQNEDETECLREPLRKASACSTYAPETMMFLDKPILAPEPLVMDNLDSIMEQLNTWNFPIFDLVENIGRKCGRILSQVSYRLFEDMGLFEAFKIPIREFMNYFHALEIGYRDIPYHNRIHATDVLHAVWYLTTQPIPGLSTVINDHGSTSDSDSDSGFTHGHMGYVFSKTYNVTDDKYGCLSGNIPALELMALYVAAAMHDYDHPGRTNAFLVATSAPQAVLYNDRSVLENHHAAAAWNLFMSRPEYNFLINLDHVEFKHFRFLVIEAILATDLKKHFDFVAKFNGKVNDDVGIDWTNENDRLLVCQMCIKLADINGPAKCKELHLQWTDGIVNEFYEQGDEEASLGLPISPFMDRSAPQLANLQESFISHIVGPLCNSYDSAGLMPGKWVEDSDESGDTDDPEEEEEEAPAPNEEETCENNESPKKKTFKRRKIYCQITQHLLQNHKMWKKVIEEEQRLAGIENQSLDQTPQSHSSEQIQAIKEEEEEKGKPRGEEIPTQKPDQ

SEQ ID NO: 238 - protein, 418 aa, Homo sapiens
MFSPDQENHPSKAPVKYGELIVLGYNGSLPNGDRGRRKSRFALFKRPKANGVKPSTVHIACTPQAAKAISNKDQHSISYTLSRAQTVVVEYTHDSNTDMFQIGRSTESPIDFVVTDTVPGSQSNSDTQSVQSTISRFACRIICERNPPFTARIYAAGFDSSKNIFLGEKAAKWKTSDGQMDGLTTNGVLVMHPRNGFTEDSKPGIWREISVCGNVFSLRETRSAQQRGKMVEIETNQLQDGSLIDLCGATLLWRTAEGLSHTPTVKHLEALRQEINAARPQCPVGFNTLAFPSMKRKDVVDEKQPWVYLNCGHVHGYHNWGNKEERDGKDRECPMCRSVGPYVPLWLGCEAGFYVDAGPPTHAFSPCGHVCSEKTTAYWSQIPLPHGTHTFHAACPFCAHQLAGEQGYIRLIFQGPLD

SEQ ID NO: 239 - protein, 4574 aa, Homo sapiens
MSGEDAEVRAVSEDVSNGSSGSPSPGDTLPWNLGKTQRSRRSGGGAGSNGSVLDPAERAVIRIADERDRVQKKTFTKWVNKHLIKAQRHISDLYEDLRDGHNLISLLEVLSGDSLPREKGRMRFHKLQNVQIALDYLRHRQVKLVNIRNDDIADGNPKLTLGLIWTIILHFQISDIQVSGQSEDMTAKEKLLLWSQRMVEGYQGLRCDNFTSSWRDGRLFNAIIHRHKPLLIDMNKVYRQTNLENLDQAFSVAERDLGVTRLLDPEDVDVPQPDEKSIITYVSSLYDAMPRVPDVQDGVRANELQLRWQEYRELVLLLLQWMRHHTAAFEERRFPSSFEEIEILWSQFLKFKEMELPAKEADKNRSKGIYQSLEGAVQAGQLKVPPGYHPLDVEKEWGKLHVAILEREKQLRSEFERLECLQRIVTKLQMEAGLCEEQLNQADALLQSDVRLLAAGKVPQRAGEVERDLDKADSMIRLLFNDVQTLKDGRHPQGEQMYRRVYRLHERLVAIRTEYNLRLKAGVAAPATQVAQVTLQSVQRRPELEDSTLRYLQDLLAWVEENQHRVDGAEWGVDLPSVEAQLGSHRGLHQSIEEFRAKIERARSDEGQLSPATRGAYRDCLGRLDLQYAKLLNSSKARLRSLESLHSFVAAATKELMWLNEKEEEEVGFDWSDRNTNMTAKKESYSALMRELELKEKKIKELQNAGDRLLREDHPARPTVESFQAALQTQWSWMLQLCCCIEAHLKENAAYFQFFSDVREAEGQLQKLQEALRRKYSCDRSATVTRLEDLLQDAQDEKEQLNEYKGHLSGLAKRAKAVVQLKPRHPAHPMRGRLPLLAVCDYKQVEVTVHKGDECQLVGPAQPSHWKVLSSSGSEAAVPSVCFLVPPPNQEAQEAVTRLEAQHQALVTLWHQLHVDMKSLLAWQSLRRDVQLIRSWSLATFRTLKPEEQRQALHSLELHYQAFLRDSQDAGGFGPEDRLMAEREYGSCSHHYQQLLQSLEQGAQEESRCQRCISELKDIRLQLEACETRTVHRLRLPLDKEPARECAQRIAEQQKAQAEVEGLGKGVARLSAEAEKVLALPEPSPAAPTLRSELELTLGKLEQVRSLSAIYLEKLKTISLVIRGTQGAEEVLRAHEEQLKEAQAVPATLPELEATKASLKKLRAQAEAQQPTFDALRDELRGAQEVGERLQQRHGERDVEVERWRERVAQLLERWQAVLAQTDVRQRELEQLGRQLRYYRESADPLGAWLQDARRRQEQIQAMPLADSQAVREQLRQEQALLEEIERHGEKVEECQRFAKQYINAIKDYELQLVTYKAQLEPVASPAKKPKVQSGSESVIQEYVDLRTHYSELTTLTSQYIKFISETLRRMEEEERLAEQQRAEERERLAEVEAALEKQRQLAEAHAQAKAQAEREAKELQQRMQEEVVRREEAAVDAQQQKRSIQEELQQLRQSSEAEIQAKARQAEAAERSRLRIEEEIRVVRLQLEATERQRGGAEGELQALRARAEEAEAQKRQAQEEAERLRRQVQDESQRKRQAEVELASRVKAEAEAAREKQRALQALEELRLQAEEAERRLRQAEVERARQVQVALETAQRSAEAELQSKRASFAEKTAQLERSLQEEHVAVAQLREEAERRAQQQAEAERAREEAERELERWQLKANEALRLRLQAEEVAQQKSLAQAEAEKQKEEAEREARRRGKAEEQAVRQRELAEQELEKQRQLAEGTAQQRLAAEQELIRLRAETEQGEQQRQLLEEELARLQREAAAATQKRQELEAELAKVRAEMEVLLASKARAEEESRSTSEKSKQRLEAEAGRFRELAEEAARLRALAEEAKRQRQLAEEDAARQRAEAERVLAEKLAAIGEATRLKTEAEIALKEKEAENERLRRLAEDEAFQRRRLEEQAAQHKADIEERLAQLRKASDSELERQKGLVEDTLRQRRQVEEEILALKASFEKAAAGKAELELELGRIRSNAEDTLRSKEQAELEAARQRQLAAEEERRRREAEERVQKSLAAEEEAARQRKAALEEVERLKAKVEEARRLRERAEQESARQLQLAQEAAQKRLQAEEKAHAFAVQQKEQELQQTLQQEQSVLDQLRGEAEAARRAAEEAEEARVQAEREAAQSRRQVEEAERLKQSAEEQAQARAQAQAAAEKLRKEAEQEAARRAQAEQAALRQKQAADAEMEKHKKFAEQTLRQKAQVEQELTTLRLQLEETDHQKNLLDEELQRLKAEATEAARQRSQVEEELFSVRVQMEELSKLKARIEAENRALILRDKDNTQRFLQEEAEKMKQVAEEAARLSVAAQEAARLRQLAEEDLAQQRALAEKMLKEKMQAVQEATRLKAEAELLQQQKELAQEQARRLQEDKEQMAQQLAEETQGFQRTLEAERQRQLEMSAEAERLKLRVAEMSRAQARAEEDAQRFRKQAEEIGEKLHRTELATQEKVTLVQTLEIQRQQSDHDAERLREAIAELEREKEKLQQEAKLLQLKSEEMQTVQQEQLLQETQALQQSFLSEKDSLLQRERFIEQEKAKLEQLFQDEVAKAQQLREEQQRQQQQMEQERQRLVASMEEARRRQHEAEEGVRRKQEELQQLEQQRRQQEELLAEENQRLREQLQLLEEQHRAALAHSEEVTASQVAATKTLPNGRDALDGPAAEAEPEHSFDGLRRKVSAQRLQEAGILSAEELQRLAQGHTTVDELARREDVRHYLQGRSSIAGLLLKATNEKLSVYAALQRQLLSPGTALILLEAQAASGFLLDPVRNRRLTVNEAVKEGVVGPELHHKLLSAERAVTGYKDPYTGQQISLFQAMQKGLIVREHGIRLLEAQIATGGVIDPVHSHRVPVDVAYRRGYFDEEMNRVLADPSDDTKGFFDPNTHENLTYLQLLERCVEDPETGLCLLPLTDKAAKGGELVYTDSEARDVFEKATVSAPFGKFQGKTVTIWEIINSEYFTAEQRRDLLRQFRTGRITVEKIIKIIITVVEEQEQKGRLCFEGLRSLVPAAELLESRVIDRELYQQLQRGERSVRDVAEVDTVRRALRGANVIAGVWLEEAGQKLSIYNALKKDLLPSDMAVALLEAQAGTGHIIDPATSARLTVDEAVRAGLVGPEFHEKLLSAEKAVTGYRDPYTGQSVSLFQALKKGLIPREQGLRLLDAQLSTGGIVDPSKSHRVPLDVACARGCLDEETSRALSAPRADAKAYSDPSTGEPATYGELQQRCRPDQLTGLSLLPLSEKAARARQEELYSELQARETFEKTPVEVPVGGFKGRTVTVWELISSEYFTAEQRQELLRQFRTGKVTVEKVIKILITIVEEVETLRQERLSFSGLRAPVPASELLASGVLSRAQFEQLKDGKTTVKDLSELGSVRTLLQGSGCLAGIYLEDTKEKVSIYEAMRRGLLRATTAALLLEAQAATGFLVDPVRNQRLYVHEAVKAGVVGPELHEQLLSAEKAVTGYRDPYSGSTISLFQAMQKGLVLRQHGIRLLEAQIATGGIIDPVHSHRVPVDVAYQRGYFSEEMNRVLADPSDDTKGFFDPNTHENLTYRQLLERCVEDPETGLRLLPLKGAEKAEVVETTQVYTEEETRRAFEETQIDIPGGGSHGGSTMSLWEVMQSDLIPEEQRAQLMADFQAGRVTKERMIIIIIEIIEKTEIIRQQGLASYDYVRRRLTAEDLFEARIISLETYNLLREGTRSLREALEAESAWCYLYGTGSVAGVYLPGSRQTLSIYQALKKGLLSAEVARLLLEAQAATGFLLDPVKGERLTVDEAVRKGLVGPELHDRLLSAERAVTGYRDPYTEQTISLFQAMKKELIPTEEALRLLDAQLATGGIVDPRLGFHLPLEVAYQRGYLNKDTHDQLSEPSEVRSYVDPSTDERLSYTQLLRRCRRDDGTGQLLLPLSDARKLTFRGLRKQITMEELVRSQVMDEATALQLREGLTSIEEVTKNLQKFLEGTSCIAGVFVDATKERLSVYQAMKKGIIRPGTAFELLEAQAATGYVIDPIKGLKLTVEEAVRMGIVGPEFKDKLLSAERAVTGYKDPYSGKLISLFQAMKKGLILKDHGIRLLEAQIATGGIIDPEESHRLPVEVAYKRGLFDEEMNEILTDPSDDTKGFFDPNTEENLTYLQLMERCITDPQTGLCLLPLKEKKRERKTSSKSSVRKRRVVIVDPETGKEMSVYEAYRKGLIDHQTYLELSEQECEWEEITISSSDGVVKSMIIDRRSGRQYDIDDAIAKNLIDRSALDQYRAGTLSITEFADMLSGNAGGFRSRSSSVGSSSSYPISPAVSRTQLASWSDPTEETGPVAGILDTETLEKVSITEAMHRNLVDNITGQRLLEAQACTGGIIDPSTGERFPVTDAVNKGLVDKIMVDRINLAQKAFCGFEDPRTKTKMSAAQALKKGWLYYEAGQRFLEVQYLTGGLIEPDTPGRVPLDEALQRGTVDARTAQKLRDVGAYSKYLTCPKTKLKISYKDALDRSMVEEGTGLRLLEAAAQSTKGYYSPYSVSGSGSTAGSRTGSRTGSRAGSRRGSFDATGSGFSMTFSSSSYSSSGYGRRYASGSSASLGGPESAVA

SEQ ID NO: 240 - protein, 488 aa, Homo sapiens
MSTPGVNSSASLSPDRLNSPVTIPAVMFIFGVVGNLVAIVVLCKSRKEQKETTFYTLVCGLAVTDLLGTLLVSPVTIATYMKGQWPGGQPLCEYSTFILLFFSLSGLSIICAMSVERYLAINHAYFYSHYVDKRLAGLTLFAVYASNVLFCALPNMGLGSSRLQYPDTWCFIDWTTNVTAHAAYSYMYAGFSSFLILATVLCNVLVCGALLRMHRQFMRRTSLGTEQHHAAAAASVASRGHPAASPALPRLSDFRRRRSFRRIAGAEIQMVILLIATSLVVLICSIPLVVRVFVNQLYQPSLEREVSKNPDLQAIRIASVNPILDPWIYILLRKTVLSKAIEKIKCLFCRIGGSRRERSGQHCSDSQRTSSAMSGHSRSFISRELKEISSTSQTLLPDLSLPDLSENGLGGRNLLPGVPGMGLAQEDTTSLRTLRISETSDSSQGQDSESVLLVDEAGGSGRAGPAPKGSSLQVTFPSETLNLSEKCI

SEQ ID NO: 241 - protein, 1337 aa, Homo sapiens
MKPAAREARLPPRSPGLRWALPLLLLLLRLGQILCAGGTPSPIPDPSVATVATGENGITQISSTAESFHKQNGTGTPQVETNTSEDGESSGANDSLRTPEQGSNGTDGASQKTPSSTGPSPVFDIKAVSISPTNVILTWKSNDTAASEYKYVVKHKMENEKTITVVHQPWCNITGLRPATSYVFSITPGIGNETWGDPRVIKVITEPIPVSDLRVALTGVRKAALSWSNGNGTASCRVLLESIGSHEELTQDSRLQVNISGLKPGVQYNINPYLLQSNKTKGDPLGTEGGLDASNTERSRAGSPTAPVHDESLVGPVDPSSGQQSRDTEVLLVGLEPGTRYNATVYSQAANGTEGQPQAIEFRTNAIQVFDVTAVNISATSLTLIWKVSDNESSSNYTYKIHVAGETDSSNLNVSEPRAVIPGLRSSTFYNITVCPVLGDIEGTPGFLQVHTPPVPVSDFRVTVVSTTEIGLAWSSHDAESFQMHITQEGAGNSRVEITTNQSIIIGGLFPGTKYCFEIVPKGPNGTEGASRTVCNRTVPSAVFDIHVVYVTTTEMWLDWKSPDGASEYVYHLVIESKHGSNHTSTYDKAITLQGLIPGTLYNITISPEVDHVWGDPNSTAQYTRPSNVSNIDVSTNTTAATLSWQNFDDASPTYSYCLLIEKAGNSSNATQVVTDIGITDATVTELIPGSSYTVEIFAQVGDGIKSLEPGRKSFCTDPASMASFDCEVVPKEPALVLKWTCPPGANAGFELEVSSGAWNNATHLESCSSENGTEYRTEVTYLNFSTSYNISITTVSCGKMAAPTRNTCTTGITDPPPPDGSPNITSVSHNSVKVKFSGFEASHGPIKAYAVILTTGEAGHPSADVLKYTYEDFKKGASDTYVTYLIRTEEKGRSQSLSEVLKYEIDVGNESTTLGYYNGKLEPLGSYRACVAGFTNITFHPQNKGLIDGAESYVSFSRYSDAVSLPQDPGVICGAVFGCIFGALVIVTVGGFIFWRKKRKDAKNNEVSFSQIKPKKSKLIRVENFEAYFKKQQADSNCGFAEEYEDLKLVGISQPKYAAELAENRGKNRYNNVLPYDISRVKLSVQTHSTDDYINANYMPGYHSKKDFIATQGPLPNTLKDFWRMVWEKNVYAIIMLTKCVEQGRTKCEEYWPSKQAQDYGDITVAMTSEIVLPEWTIRDFTVKNIQTSESHPLRQFHFTSWPDHGVPDTTDLLINFRYLVRDYMKQSPPESPILVHCSAGVGRTGTFIAIDRLIYQIENENTVDVYGIVYDLRMHRPLMVQTEDQYVFLNQCVLDIVRSQKDSKVDLIYQNTTAMTIYENLAPVTTFGKTNGYIA

SEQ ID NO: 242 - protein, 341 aa, Homo sapiens
MVGEMETKEKPKPTPDYLMQLMNDKKLMSSLPNFCGIFNHLERLLDEEISRVRKDMYNDTLNGSTEKRSAELPDAVGPIVQLQEKLYVPVKEYPDFNFVGRILGPRGLTAKQLEAETGCKIMVRGKGSMRDKKKEEQNRGKPNWEHLNEDLHVLITVEDAQNRAEIKLKRAVEEVKKLLVPAAEGEDSLKKMQLMELAILNGTYRDANIKSPALAFSLAATAQAAPRIITGPAPVLPPAALRTPTPAGPTIMPLIRQIQTAVMPNGTPHPTAAIVPPGPEAGLIYTPYEYPYTLAPATSILEYPIEPSGVLGAVATKVRRHDMRVHPYQRIVTADRAATGN

SEQ ID NO: 243-244 - skipped (2 entries)

SEQ ID NO: 245 - protein, 802 aa, Homo sapiens
MEEEGGSSGGAAGTSADGGDGGEQLLTVKHELRTANLTGHAEKVGIENFELLKVLGTGAYGKVFLVRKISGHDTGKLYAMKVLKKATIVQKAKTTEHTRTERQVLEHIRQSPFLVTLHYAFQTETKLHLILDYINGGELFTHLSQRERFTEHEVQIYVGEIVLALEHLHKLGIIYRDIKLENILLDSNGHVVLTDFGLSKEFVADETERAYSFCGTIEYMAPDIVRGGDSGHDKAVDWWSLGVLMYELLTGASPFTVDGEKNSQAEISRRILKSEPPYPQEMSALAKDLIQRLLMKDPKKRLGCGPRDADEIKEHLFFQKINWDDLAAKKVPAPFKPVIRDELDVSNFAEEFTEMDPTYSPAALPQSSEKLFQGYSFVAPSILFKRNAAVIDPLQFHMGVERPGVTNVARSAMMKDSPFYQHYDLDLKDKPLGEGSFSICRKCVHKKSNQAFAVKIISKRMEANTQKEITALKLCEGHPNIVKLHEVFHDQLHTFLVMELLNGGELFERIKKKKHFSETEASYIMRKLVSAVSHMHDVGVVHRDLKPENLLFTDENDNLEIKIIDFGFARLKPPDNQPLKTPCFTLHYAAPELLNQNGYDESCDLWSLGVILYTMLSGQVPFQSHDRSLTCTSAVEIMKKIKKGDFSFEGEAWKNVSQEAKDLIQGLLTVDPNKRLKMSGLRYNEWLQDGSQLSSNPLMTPDILGSSGAAVHTCVKATFHAFNKYKREGFCLQNVDKAPLAKRRKMKKTSTSTETRSSSSESSHSSSSHSHGKTTPTKTLQPSNPADSNNPETLFQFSDSVA

SEQ ID NO: 246 - protein, 1247 aa, Homo sapiens
MEDAGAAGPGPEPEPEPEPEPEPAPEPEPEPKPGAGTSEAFSRLWTDVMGILDGSLGNIDDLAQQYADYYNTCFSDVCERMEELRKRRVSQDLEVEKPDASPTSLQLRSQIEESLGFCSAVSTPEVERKNPLHKSNSEDSSVGKGDWKKKNKYFWQNFRKNQKGIMRQTSKGEDVGYVASEITMSDEERIQLMMMVKEKMITIEEALARLKEYEAQHRQSAALDPADWPDGSYPTFDGSSNCNSREQSDDETEESVKFKRLHKLVNSTRRVRKKLIRVEEMKKPSTEGGEEHVFENSPVLDERSALYSGVHKKPLFFDGSPEKPPEDDSDSLTTSPSSSSLDTWGAGRKLVKTFSKGESRGLIKPPKKMGTFFSYPEEEKAQKVSRSLTEGEMKKGLGSLSHGRTCSFGGFDLTNRSLHVGSNNSDPMGKEGDFVYKEVIKSPTASRISLGKKVKSVKETMRKRMSKKYSSSVSEQDSGLDGMPGSPPPSQPDPEHLDKPKLKAGGSVESLRSSLSGQSSMSGQTVSTTDSSTSNRESVKSEDGDDEEPPYRGPFCGRARVHTDFTPSPYDTDSLKLKKGDIIDIISKPPMGTWMGLLNNKVGTFKFIYVDVLSEDEEKPKRPTRRRRKGRPPQPKSVEDLLDRINLKEHMPTFLFNGYEDLDTFKLLEEEDLDELNIRDPEHRAVLLTAVELLQEYDSNSDQSGSQEKLLVDSQGLSGCSPRDSGCYESSENLENGKTRKASLLSAKSSTEPSLKSFSRNQLGNYPTLPLMKSGDALKQGQEEGRLGGGLAPDTSKSCDPPGVTGLNKNRRSLPVSICRSCETLEGPQTVDTWPRSHSLDDLQVEPGAEQDVPTEVTEPPPQIVPEVPQKTTASSTKAQPLEQDSAVDNALLLTQSKRFSEPQKLTTKKLEGSIAASGRGLSPPQCLPRNYDAQPPGAKHGLARTPLEGHRKGHEFEGTHHPLGTKEGVDAEQRMQPKIPSQPPPVPAKKSRERLANGLHPVPMGPSGALPSPDAPCLPVKRGSPASPTSPSDCPPALAPRPLSGQAPGSPPSTRPPPWLSELPENTSLQEHGVKLGPALTRKVSCARGVDLETLTENKLHAEGIDLTEEPYSDKHGRCGIPEALVQRYAEDLDQPERDVAANMDQIRVKQLRKQHRMAIPSGGLTEICRKPVSPGCISSVSDWLISIGLPMYAGTLSTAGFSTLSQVPSLSHTCLQEAGITEERHIRKLLSAARLFKLPPGPEAM

SEQ ID NO: 247 - protein, 1060 aa, Homo sapiens
MELWAPQRLPQTRGKATAPSKDPDRGFRRDGHHRPVPHSWHNGERFHQWQDNRGSPQPQQEPRADHQQQPHYASRPGDWHQPVSGVDYYEGGYRNQLYSRPGYENSYQSYQSPTMREEYAYGSYYYHGHPQWLQEERVPRQRSPYIWHEDYREQKYLDEHHYENQHSPFGTNSETHFQSNSRNPCKDSPASNSGQEWPGELFPGSLLAEAQKNKPSLASESNLLQQRESGLSSSSYELSQYIRDAPERDDPPASAAWSPVQADVSSAGPKAPMKFYIPHVPVSFGPGGQLVHVGPSSPTDGQAALVELHSMEVILNDSEEQEEMRSFSGPLIREDVHKVDIMTFCQQKAAQSCKSETLGSRDSALLWQLLVLLCRQNGSMVGSDIAELLMQDCKKLEKYKRQPPVANLINLTDEDWPVLSSGTPNLLTGEIPPSVETPAQIVEKFTRLLYYGRKKEALEWAMKNHLWGHALFLSSKMDPQTYSWVMSGFTSTLALNDPLQTLFQLMSGRIPQAATCCGEKQWGDWRPHLAVILSNQAGDPELYQRAIVAIGDTLAGKGLVEAAHFCYLMAHVPFGHYTVKTDHLVLLGSSHSQEFLKFATTEAIQRTEIFEYCQMLGRPKSFIPSFQVYKLLYASRLADYGLVSQALHYCEAIGAAVLSQGESSHPVLLVELIKLAEKLKLSDPLVLERRSGDRDLEPDWLAQLRRQLEQKVAGDIGDPHPTRSDISGAGGTTTENTFYQDFSGCQGYSEAPGYRSALWLTPEQTCLLQPSPQQPFPLQPGSYPAGGGAGQTGTPRPFYSVPETHLPGTGSSVAVTEATGGTVWEEMLQTHLGPGENTVSQETSQPPDGQEVISKPQTPLAARPRSISESSASSAKEDEKESSDEADKNSPRNTAQRGKLGDGKEHTKSSGFGWFSWFRSKPTKNASPAGDEDSSDSPDSEETPRASSPHQAGLGLSLTPSPESPPLPDVSAFSRGRGGGEGRGSASSGGAAAGAGVGGLSGPESVSFELCSNPGVLLPPPALKGAVPLYNPSQVPQLPTATSLNRPNRLAQRRYPTQPC

SEQ ID NO: 248 - skipped

SEQ ID NO: 249 - protein, 359 aa, Homo sapiens
MQAAALPEEIRWLLEDAEEFLAEGLRNENLSAVARDHRDHILRGFQQIKARYYWDFQPQGGDIGQDSSDDNHSGTLGLSLTSDAPFLSDYQDEGMEDIVKGAQELDNVIKQGYLEKKSKDHSFFGSEWQKRWCVVSRGLFYYYANEKSKQPKGTFLIKGYGVRMAPHLRRDSKKESCFELTSQDRRSYEFTATSPAEARDWVDQISFLLKDLSSLTIPYEEDEEEEEKEETYDDIDGFDSPSCGSQCRPTILPGSVGIKEPTEEKEEEDIYEVLPDEEHDLEEDESGTRRKGVDYASYYQGLWDCHGDQPDELSFQRGDLIRILSKEYNMYGWWVGELNSLVGIVPKEYLTTAFEVEER

SEQ ID NO: 250 - skipped

SEQ ID NO: 251 - protein, 675 aa, Homo sapiens
MAAAKVALTKRADPAELRTIFLKYASIEKNGEFFMSPNDFVTRYLNIFGESQPNPKTVELLSGVVDQTKDGLISFQEFVAFESVLCAPDALFMVAFQLFDKAGKGEVTFEDVKQVFGQTTIHQHIPFNWDSEFVQLHFGKERKRHLTYAEFTQFLLEIQLEHAKQAFVQRDNARTGRVTAIDFRDIMVTIRPHVLTPFVEECLVAAAGGTTSHQVSFSYFNGFNSLLNNMELIRKIYSTLAGTRKDVEVTKEEFVLAAQKFGQVTPMEVDILFQLADLYEPRGRMTLADIERIAPLEEGTLPFNLAEAQRQKASGDSARPVLLQVAESAYRFGLGSVAGAVGATAVYPIDLVKTRMQNQRSTGSFVGELMYKNSFDCFKKVLRYEGFFGLYRGLLPQLLGVAPEKAIKLTVNDFVRDKFMHKDGSVPLAAEILAGGCAGGSQVIFTNPLEIVKIRLQVAGEITTGPRVSALSVVRDLGFFGIYKGAKACFLRDIPFSAIYFPCYAHVKASFANEDGQVSPGSLLLAGAIAGMPAASLVTPADVIKTRLQVAARAGQTTYSGVIDCFRKILREEGPKALWKGAGARVFRSSPQFGVTLLTYELLQRWFYIDFGGVKPMGSEPVPKSRINLPAPNPDHVGGYKLAVATFAGIENKFGLYLPLFKPSVSTSKAIGGGP

SEQ ID NO: 252 - protein, 461 aa, Homo sapiens
MGTIHLFRKPQRSFFGKLLREFRLVAADRRSWKILLFGVINLICTGFLLMWCSSTNSIALTAYTYLTIFDLFSLMTCLISYWVTLRKPSPVYSFGFERLEVLAVFASTVLAQLGALFILKESAERFLEQPEIHTGRLLVGTFVALCFNLFTMLSIRNKPFAYVSEAASTSWLQEHVADLSRSLCGIIPGLSSIFLPRMNPFVLIDLAGAFALCITYMLIEINNYFAVDTASAIAIALMTFGTMYPMSVYSGKVLLQTTPPHVIGQLDKLIREVSTLDGVLEVRNEHFWTLGFGSLAGSVHVRIRRDANEQMVLAHVTNRLYTLVSTLTVQIFKDDWIRPALLSGPVAANVLNFSDHHVIPMPLLKGTDDLNPVTSTPAKPSSPPPEFSFNTPGKNVNPVILLNTQTRPYGFGLNHGHTPYSSMLNQGLGVPGIGATQGLRTGFTNIPSRYGTNNRIGQPRP

SEQ ID NO: 253 - skipped

SEQ ID NO: 254 - protein, 470 aa, Homo sapiens
MHFSIPETESRSGDSGGSAYVAYNIHVNGVLHCRVRYSQLLGLHEQLRKEYGANVLPAFPPKKLFSLTPAEVEQRREQLEKYMQAVRQDPLLGSSETFNSFLRRAQQETQQVPTEEVSLEVLLSNGQKVLVNVLTSDQTEDVLEAVAAKLDLPDDLIGYFSLFLVREKEDGAFSFVRKLQEFELPYVSVTSLRSQEYKIVLRKSYWDSAYDDDVMENRVGLNLLYAQTVSDIERGWILVTKEQHRQLKSLQEKVSKKEFLRLAQTLRHYGYLRFDACVADFPEKDCPVVVSAGNSELSLQLRLPGQQLREGSFRVTRMRCWRVTSSVPLPSGSTSSPGRGRGEVRLELAFEYLMSKDRLQWVTITSPQAIMMSICLQSMVDELMVKKSGGSIRKMLRRRVGGTLRRSDSQQAVKSPPLLESPDATRESMVKLSSKLSAVSLRGIGSPSTDASASDVHGNFAFEGIGDEDL

SEQ ID NO: 255 - protein, 622 aa, Homo sapiens
MSMRSPISAQLALDGVGTMVNCTIKSEEKKEPCHEAPQGSATAAEPQPGDPARASQDSADPQAPAQGNFRGSWDCSSPEGNGSPEPKRPGVSEAASGSQEKLDFNRNLKEVVPAIEKLLSSDWKERFLGRNSMEAKDVKGTQESLAEKELQLLVMIHQLSTLRDQLLTAHSEQKNMAAMLFEKQQQQMELARQQQEQIAKQQQQLIQQQHKINLLQQQIQQVNMPYVMIPAFPPSHQPLPVTPDSQLALPIQPIPCKPVEYPLQLLHSPPAPVVKRPGAMATHHPLQEPSQPLNLTAKPKAPELPNTSSSPSLKMSSCVPRPPSHGGPTRDLQSSPPSLPLGFLGEGDAVTKAIQDARQLLHSHSGALDGSPNTPFRKDLISLDSSPAKERLEDGCVHPLEEAMLSCDMDGSRHFPESRNSSHIKRPMNAFMVWAKDERRKILQAFPDMHNSSISKILGSRWKSMTNQEKQPYYEEQARLSRQHLEKYPDYKYKPRPKRTCIVEGKRLRVGEYKALMRTRRQDARQSYVIPPQAGQVQMSSSDVLYPRAAGMPLAQPLVEHYVPRSLDPNMPVIVNTCSLREEGEGTDDRHSVADGEMYRYSEDEDSEGEEKSDGELVVLTD

SEQ ID NO: 256 - protein, 238 aa, Homo sapiens
MSRYGRYGGETKVYVGNLGTGAGKGELERAFSYYGPLRTVWIARNPPGFAFVEFEDPRDAEDAVRGLDGKVICGSRVRVELSTGMPRRSRFDRPPARRPFDPNDRCYECGEKGHYAYDCHRYSRRRRSRSRSRSHSRSRGRRYSRSRSRSRGRRSRSASPRRSRSISLRRSRSASLRRSRSGSIKGSRYFQSPSRSRSRSRSISRPRSSRSKSRSPSPKRSRSPSGSPRRSASPERMD

SEQ ID NO: 257 - protein, 1094 aa, Homo sapiens
MAARQAVGSGAQETCGLDRILEALKLLLSPGGSGSSSLQVTKHDVLLATLKSNLSALEDKFLKDPQWKNLKLLRDEIADKAEWPQNSVDVTWSFTSQTLLLLLCLKETMIRLAANFNPGKPNPRTPEVAPALSPDALSISQQKTVQFVLQFVVTLGICPYLMPGVGVPLRYRTEFGAVVQDVVCFDAAPDATRRLYTSCKALLNVAQHTSLGSLIFCHHFGDIAAGLCQLGFCPTKRKLLTPAEEVLTEEERTLSRGALRDMLDQVYQPLAVRELLILQGGPPQSCTDVKTQMRCRAPAWLRRLCGQLLSERLMRPNGVQAVVRGILEGAGAGAAGGSDAEVTAADWKKCDLIAKILASCPQQSLSPENYYRDICPQVLDLFHFQDKLTARQFQRVATTTFITLSRERPHLAAKYLLQPVLAPLHRCLNTAELSESDMVPGTILVTEEELSRCIEDVFKVYVVGNEPLTVLMDSLLPVLGVLFLLYCFTKQSVSHIRSLCQEILLWILGKLERKKAIASLKGFAGLDKAVPSLHSLCQFRVATQGGIMITIKEAISDEDEDEALYQKVSSEQGRVEHLGDLLSHCQECGLAGDFFIFCLKELTHVASENETELKTEPFSSKSLLELEQHQTLLVEGQERKLLVLQLMAVLCERMSEQIFTNVTQVVDFVAATLQRACASLAHQAESTVESQTLSMSMGLVAVMLGGAVQLKSSDFAVLKQLLPLLEKVSNTYPDPVIQELAVDLRITISTHGAFATEAVSMAAQSTLNRKDLEGKIEEQQQTSHERPTDVAHSHLEQQQSHETAPQTGLQSNAPIIPQGVNEPSTTTSQKSGSVTTEQLQEVLLSAYDPQIPTRAAALRTLSHWIEQREAKALEMQEKLLKIFLENLEHEDTFVYLSAIQGVALLSDVYPEKILPDLLAQYDSSKDKHTPETRMKVGEVLMRIVRALGDMVSKYREPLIHTFLRGVRDPDGAHRASSLANLGELCQRLDFLLGSVVHEVTACLIAVAKTDGEVQVRRAAIHVVVLLLRGLSQKATEVLSAVLKDLYHLLKHVVCLEPDDVAKLHAQLALEELDDIMKNFLFPPQKLEKKIMVLP

SEQ ID NO: 258 - protein, 2768 aa, Homo sapiens
MALVLEIFTLLASICWVSANIFEYQVDAQPLRPCELQRETAFLKQADYVPQCAEDGSFQTVQCQNDGRSCWCVGANGSEVLGSRQPGRPVACLSFCQLQKQQILLSGYINSTDTSYLPQCQDSGDYAPVQCDVQQVQCWCVDAEGMEVYGTRQLGRPKRCPRSCEIRNRRLLHGVGDKSPPQCSAEGEFMPVQCKFVNTTDMMIFDLVHSYNRFPDAFVTFSSFQRRFPEVSGYCHCADSQGRELAETGLELLLDEIYDTIFAGLDLPSTFTETTLYRILQRRFLAVQSVISGRFRCPTKCEVERFTATSFGHPYVPSCRRNGDYQAVQCQTEGPCWCVDAQGKEMHGTRQQGEPPSCAEGQSCASERQQALSRLYFGTSGYFSQHDLFSSPEKRWASPRVARFATSCPPTIKELFVDSGLLRPMVEGQSQQFSVSENLLKEAIRAIFPSRGLARLALQFTTNPKRLQQNLFGGKFLVNVGQFNLSGALGTRGTFNFSQFFQQLGLASFLNGGRQEDLAKPLSVGLDSNSSTGTPEAAKKDGTMNKPTVGSFGFEINLQENQNALKFLASLLELPEFLLFLQHAISVPEDVARDLGDVMETVLSSQTCEQTPERLFVPSCTTEGSYEDVQCFSGECWCVNSWGKELPGSRVRGGQPRCPTDCEKQRARMQSLMGSQPAGSTLFVPACTSEGHFLPVQCFNSECYCVDAEGQAIPGTRSAIGKPKKCPTPCQLQSEQAFLRTVQALLSNSSMLPTLSDTYIPQCSTDGQWRQVQCNGPPEQVFELYQRWEAQNKGQDLTPAKLLVKIMSYREAASGNFSLFIQSLYEAGQQDVFPVLSQYPSLQDVPLAALEGKRPQPRENILLEPYLFWQILNGQLSQYPGSYSDFSTPLAHFDLRNCWCVDEAGQELEGMRSEPSKLPTCPGSCEEAKLRVLQFIRETEEIVSASNSSRFPLGESFLVAKGIRLRNEDLGLPPLFPPREAFAEQFLRGSDYAIRLAAQSTLSFYQRRRFSPDDSAGASALLRSGPYMPQCDAFGSWEPVQCHAGTGHCWCVDEKGGFIPGSLTARSLQIPQCPTTCEKSRTSGLLSSWKQARSQENPSPKDLFVPACLETGEYARLQASGAGTWCVDPASGEELRPGSSSSAQCPSLCNVLKSGVLSRRVSPGYVPACRAEDGGFSPVQCDQAQGSCWCVMDSGEEVPGTRVTGGQPACESPRCPLPFNASEVVGGTILCETISGPTGSAMQQCQLLCRQGSWSVFPPGPLICSLESGRWESQLPQPRACQRPQLWQTIQTQGHFQLQLPPGKMCSADYADLLQTFQVFILDELTARGFCQIQVKTFGTLVSIPVCNNSSVQVGCLTRERLGVNVTWKSRLEDIPVASLPDLHDIERALVGKDLLGRFTDLIQSGSFQLHLDSKTFPAETIRFLQGDHFGTSPRTWFGCSEGFYQVLTSEASQDGLGCVKCPEGSYSQDEECIPCPVGFYQEQAGSLACVPCPVGRTTISAGAFSQTHCVTDCQRNEAGLQCDQNGQYRASQKDRGSGKAFCVDGEGRRLPWWETEAPLEDSQCLMMQKFEKVPESKVIFDANAPVAVRSKVPDSEFPVMQCLTDCTEDEACSFFTVSTTEPEISCDFYAWTSDNVACMTSDQKRDALGNSKATSFGSLRCQVKVRSHGQDSPAVYLKKGQGSTTTLQKRFEPTGFQNMLSGLYNPIVFSASGANLTDAHLFCLLACDRDLCCDGFVLTQVQGGAIICGLLSSPSVLLCNVKDWMDPSEAWANATCPGVTYDQESHQVILRLGDQEFIKSLTPLEGTQDTFTNFQQVYLWKDSDMGSRPESMGCRKDTVPRPASPTEAGLTTELFSPVDLNQVIVNGNQSLSSQKHWLFKHLFSAQQANLWCLSRCVQEHSFCQLAEITESASLYFTCTLYPEAQVCDDIMESNAQGCRLILPQMPKALFRKKVILEDKVKNFYTRLPFQKLMGISIRNKVPMSEKSISNGFFECERRCDADPCCTGFGFLNVSQLKGGEVTCLTLNSLGIQMCSEENGGAWRILDCGSPDIEVHTYPFGWYQKPIAQNNAPSFCPLVVLPSLTEKVSLDSWQSLALSSVVVDPSIRHFDVAHVSTAATSNFSAVRDLCLSECSQHEACLITTLQTQPGAVRCMFYADTQSCTHSLQGQNCRLLLREEATHIYRKPGISLLSYEASVPSVPISTHGRLLGRSQAIQVGTSWKQVDQFLGVPYAAPPLAERRFQAPEPLNWTGSWDASKPRASCWQPGTRTSTSPGVSEDCLYLNVFIPQNVAPNASVLVFFHNTMDREESEGWPAIDGSFLAAVGNLIVVTASYRVGVFGFLSSGSGEVSGNWGLLDQVAALTWVQTHIRGFGGDPRRVSLAADRGGADVASIHLLTARATNSQLFRRAVLMGGSALSPAAVISHERAQQQAIALAKEVSCPMSSSQEVVSCLRQKPANVLNDAQTKLLAVSGPFHYWGPVIDGHFLREPPARALKRSLWVEVDLLIGSSQDDGLINRAKAVKQFEESRGRTSSKTAFYQALQNSLGGEDSDARVEAAATWYYSLEHSTDDYASFSRALENATRDYFIICPIIDMASAWAKRARGNVFMYHAPENYGHGSLELLADVQFALGLPFYPAYEGQFSLEEKSLSLKIMQYFSHFIRSGNPNYPYEFSRKVPTFATPWPDFVPRAGGENYKEFSELLPNRQGLKKADCSFWSKYISSLKTSADGAKGGQSAESEEEELTAGSGLREDLLSLQEPGSKTYSK

SEQ ID NO: 259 - protein, 677 aa, Homo sapiens
MKVLGRSFFWVLFPVLPWAVQAVEHEEVAQRVIKLHRGRGVAAMQSRQWVRDSCRKLSGLLRQKNAVLNKLKTAIGAVEKDVGLSDEEKLFQVHTFEIFQKELNESENSVFQAVYGLQRALQGDYKDVVNMKESSRQRLEALREAAIKEETEYMELLAAEKHQVEALKNMQHQNQSLSMLDEILEDVRKAADRLEEEIEEHAFDDNKSVKGVNFEAVLRVEEEEANSKQNITKREVEDDLGLSMLIDSQNNQYILTKPRDSTIPRADHHFIKDIVTIGMLSLPCGWLCTAIGLPTMFGYIICGVLLGPSGLNSIKSIVQVETLGEFGVFFTLFLVGLEFSPEKLRKVWKISLQGPCYMTLLMIAFGLLWGHLLRIKPTQSVFISTCLSLSSTPLVSRFLMGSARGDKEGDIDYSTVLLGMLVTQDVQLGLFMAVMPTLIQAGASASSSIVVEVLRILVLIGQILFSLAAVFLLCLVIKKYLIGPYYRKLHMESKGNKEILILGISAFIFLMLTVTELLDVSMELGCFLAGALVSSQGPVVTEEIATSIEPIRDFLAIVFFASIGLHVFPTFVAYELTVLVFLTLSVVVMKFLLAALVLSLILPRSSQYIKWIVSAGLAQVSEFSFVLGSRARRAGVISREVYLLILSVTTLSLLLAPVLWRAAITRCVPRPERRSSL

SEQ ID NO: 260 - protein, 1445 aa, Homo sapiens
MEEGHGLDLTYITERIIAVSFPAGCSEESYLHNLQEVTRMLKSKHGDNYLVLNLSEKRYDLTKLNPKIMDVGWPELHAPPLDKMCTICKAQESWLNSNLQHVVVIHCRGGKGRIGVVISSYMHFTNVSASADQALDRFAMKKFYDDKVSALMQPSQKRYVQFLSGLLSGSVKMNASPLFLHFVILHGTPNFDTGGVCRPFLKLYQAMQPVYTSGIYNVGPENPSRICIVIEPAQLLKGDVMVKCYHKKYRSATRDVIFRLQFHTGAVQGYGLVFGKEDLDNASKDDRFPDYGKVELVFSATPEKIQGSEHLYNDHGVIVDYNTTDPLIRWDSYENLSADGEVLHTQGPVDGSLYAKVRKKSSSDPGIPGGPQAIPATNSPDHSDHTLSVSSDSGHSTASARTDKTEERLAPGTRRGLSAQEKAELDQLLSGFGLEDPGSSLKEMTDARSKYSGTRHVVPAQVHVNGDAALKDRETDILDDEMPHHDLHSVDSLGTLSSSEGPQSAHLGPFTCHKSSQNSLLSDGFGSNVGEDPQGTLVPDLGLGMDGPYERERTFGSREPKQPQPLLRKPSVSAQMQAYGQSSYSTQTWVRQQQMVVAHQYSFAPDGEARLVSRCPADNPGLVQAQPRVPLTPTRGTSSRVAVQRGVGSGPHPPDTQQPSPSKAFKPRFPGDQVVNGAGPELSTGPSPGSPTLDIDQSIEQLNRLILELDPTFEPIPTHMNALGSQANGSVSPDSVGGGLRASSRLPDTGEGPSRATGRQGSSAEQPLGGRLRKLSLGQYDNDAGGQLPFSKCAWGKAGVDYAPNLPPFPSPADVKETMTPGYPQDLDIIDGRILSSKESMCSTPAFPVSPETPYVKTALRHPPFSPPEPPLSSPASQHKGGREPRSCPETLTHAVGMSESPIGPKSTMLRADASSTPSFQQAFASSCTISSNGPGQRRESSSSAERQWVESSPKPMVSLLGSGRPTGSPLSAEFSGTRKDSPVLSCFPPSELQAPFHSHELSLAEPPDSLAPPSSQAFLGFGTAPVGSGLPPEEDLGALLANSHGASPTPSIPLTATGAADNGFLSHNFLTVAPGHSSHHSPGLQGQGVTLPGQPPLPEKKRASEGDRSLGSVSPSSSGFSSPHSGSTISIPFPNVLPDFSKASEAASPLPDSPGDKLVIVKFVQDTSKFWYKADISREQAIAMLKDKEPGSFIVRDSHSFRGAYGLAMKVATPPPSVLQLNKKAGDLANELVRHFLIECTPKGVRLKGCSNEPYFGSLTALVCQHSITPLALPCKLLIPERDPLEEIAESSPQTAANSAAELLKQGAACNVWYLNSVEMESLTGHQAIQKALSITLVQEPPPVSTVVHFKVSAQGITLTDNQRKLFFRRHYPVNSVIFCALDPQDRKWIKDGPSSKVFGFVARKQGSATDNVCHLFAEHDPEQPASAIVNFVSKVMIGSPKKV

SEQ ID NO: 261 - skipped

SEQ ID NO: 262 - protein, 1016 aa, Homo sapiens
MEVAVEKAVAAAAAASAAASGGPSAAPSGENEAESRQGPDSERGGEAARLNLLDTCAVCHQNIQSRAPKLLPCLHSFCQRCLPAPQRYLMLPAPMLGSAETPPPVPAPGSPVSGSSPFATQVGVIRCPVCSQECAERHIIDNFFVKDTTEVPSSTVEKSNQVCTSCEDNAEANGFCVECVEWLCKTCIRAHQRVKFTKDHTVRQKEEVSPEAVGVTSQRPVFCPFHKKEQLKLYCETCDKLTCRDCQLLEHKEHRYQFIEEAFQNQKVIIDTLITKLMEKTKYIKFTGNQIQNRIIEVNQNQKQVEQDIKVAIFTLMVEINKKGKALLHQLESLAKDHRMKLMQQQQEVAGLSKQLEHVMHFSKWAVSSGSSTALLYSKRLITYRLRHLLRARCDASPVTNNTIQFHCDPSFWAQNIINLGSLVIEDKESQPQMPKQNPVVEQNSQPPSGLSSNQLSKFPTQISLAQLRLQHMQQQQPPPRLINFQNHSPKPNGPVLPPHPQQLRYPPNQNIPRQAIKPNPLQMAFLAQQAIKQWQISSGQGTPSTTNSTSSTPSSPTITSAAGYDGKAFGSPMIDLSSPVGGSYNLPSLPDIDCSSTIMLDNIVRKDTNIDHGQPRPPSNRTVQSPNSSVPSPGLAGPVTMTSVHPPIRSPSASSVGSRGSSGSSSKPAGADSTHKVPVVMLEPIRIKQENSGPPENYDFPVVIVKQESDEESRPQNANYPRSILTSLLLNSSQSSTSEETVLRSDAPDSTGDQPGLHQDNSSNGKSEWLDPSQKSPLHVGETRKEDDPNEDWCAVCQNGGELLCCEKCPKVFHLSCHVPTLTNFPSGEWICTFCRDLSKPEVEYDCDAPSHNSEKKKTEGLVKLTPIDKRKCERLLLFLYCHEMSLAFQDPVPLTVPDYYKIIKNPMDLSTIKKRLQEDYSMYSKPEDFVADFRLIFQNCAEFNEPDSEVANAGIKLENYFEELLKNLYPEKRFPKPEFRNESEDNKFSDDSDDDFVQPRKKRLKSIEERQLLK

SEQ ID NO: 263 - protein, 2481 aa, Homo sapiens
MEQSPPPAPEPTQGPTPARSRRRREPESPPASAPIPLFGADTIGQRSPDGPVLSKAEFVEKVRQSNQACHDGDFHTAIVLYNEALAVDPQNCILYSNRSAAYMKIQQYDKALDDAIKARLLNPKWPKAYFRQGVALQYLGRHADALAAFASGLAQDPKSLQLLVGMVEAAMKSPMRDSLEPTYQQLQKMKLDKSPFVVVSVVGQELLTAGHHGASVVVLEAALKIGTCSLKLRGSVFSALSSAYWSLGNTEKSTGYMQQDLDVAKTLGDQTGECRAHGNLGSAFFSKGNYREALTNHRHQLVLAMKLKDREAASSALSSLGHVYTAIGDYPNALASHKQCVLLAKQSKDELSEARELGNMGAVYIAMGDFENAVQCHEQHLKIAKDLGNKREEARAYSNLGSAYHYRRNFDKAMSYHNYVLELAQELMEKAIEMRAYAGLGHAARCMQDLERAKQYHEQQLGIAEDLKDRAAEGRASSNLGIIHQMKGDYDTALKLHKTHLCIAQELSDYAAQGRAYGNMGNAYNALGMYDQAVKYHRQELQISMEVNDRASQASTHGNLAVAYQALGAHDRALQHYQNHLNIARELRDIQSEARALSNLGNFHCSRGEYVQAAPYYEQYLRLAPDLQDMEGEGKVCHNLGYAHYCLGNYQEAVKYYEQDLALAKDLHDKLSQAKAYCNLGLAFKALLNFSKAEECQKYLLSLAQSLNNSQAKFRALGNLGDIFICKKDINGAIKFYEQQLGLAHQVKDRRLEASAYAALGTAYRMIQKYDKALGYHTQELEVYQELSDLPGECRAHGHLAAVYMALGKYTMAFKCYEEQLDLGQKLKDPSLEAQVYGNMGITKMNMNVMEEAIGYFEQQLAMLQQLSGNESVLDRGRAYGNLGDCYEALGDYEEAIKYYEQYLSVAQSLNRMQDQAKAYRGLGNGHRAMGSLQQALVCFEKRLVVAHELGEAFNKAQAYGELGSLHSQLGNYEQAISCLERQLNIARDMKDRALESDAACGLGGVYQQMGEYDTALQYHQLDLQIAEETNNPTCQGRAYGNLGLTYESLGTFERAVVYQEQHLSIAAQMNDLAAKTVSYSSLGRTHHALQNYSQAVMYLQEGLRLAEQLGRREDEAKIRHGLGLSLWASGNLEEAQHQLYRASALFETIRHEAQLSTDYKLSLFDLQTSSYQALQRVLVSLGHHDEALAVAERGRTRAFADLLVERQTGQQDSDPYSPVTIDQILEMVNGQRGLVLYYSLAAGYLYSWLLAPGAGIVKFHEHYLGENTVENSSDFQASSSVTLPTATGSALEQHIASVREALGVESHYSRACASSETESEAGDIMDQQFEEMNNKLNSVTDPTGFLRMVRRNNLFNRSCQSMTSLFSNTVSPTQDGTSSLPRRQSSFAKPPLRALYDLLIAPMEGGLMHSSGPVGRHRQLILVLEGELYLIPFALLKGSSSNEYLYERFGLLAVPSIRSLSVQSKSHLRKNPPTYSSSTSMAAVIGNPKLPSAVMDRWLWGPMPSAEEEAYMVSELLGCQPLVGSVATKERVMSALTQAECVHFATHISWKLSALVLTPSMDGNPASSKSSFGHPYTIPESLRVQDDASDGESISDCPPLQELLLTAADVLDLQLPVKLVVLGSSQESNSKVTADGVIALTRAFLAAGAQCVLVSLWPVPVAASKMFIHAFYSSLLNGLKASAALGEAMKVVQSSKAFSHPSNWAGFMLIGSDVKLNSPSSLIGQALTEILQHPERARDALRVLLHLVEKSLQRIQNGQRNAMYTSQQSVENKVGGIPGWQALLTAVGFRLDPPTSGLPAAVFFPTSDPGDRLQQCSSTLQSLLGLPNPALQALCKLITASETGEQLISRAVKNMVGMLHQVLVQLQAGEKEQDLASAPIQVSISVQLWRLPGCHEFLAALGFDLCEVGQEEVILKTGKQANRRTVHFALQSLLSLFDSTELPKRLSLDSSSSLESLASAQSVSNALPLGYQQPPFSPTGADSIASDAISVYSLSSIASSMSFVSKPEGGSEGGGPGGRQDHDRSKNAYLQRSTLPRSQLPPQTRPAGNKDEEEYEGFSIISNEPLATYQENRNTCFSPDHKQPQPGTAGGMRVSVSSKGSISTPNSPVKMTLIPSPNSPFQKVGKLASSDTGESDQSSTETDSTVKSQEESNPKLDPQELAQKILEETQSHLIAVERLQRSGGQVSKSNNPEDGVQAPSSTAVFRASETSAFSRPVLSHQKSQPSPVTVKPKPPARSSSLPKVSSGYSSPTTSEMSIKDSPSQHSGRPSPGCDSQTSQLDQPLFKLKYPSSPYSAHISKSPRNMSPSSGHQSPAGSAPSPALSYSSAGSARSSPADAPDIDKLKMAAIDEKVQAVHNLKMFWQSTPQHSTGPMKIFRGAPGTMTSKRDVLSLLNLSPRHNKKEEGVDKLELKELSLQQHDGAPPKAPPNGHWRTETTSLGSLPLPAGPPATAPARPLRLPSGNGYKFLSPGRFFPSSKC

SEQ ID NO: 264 - skipped

SEQ ID NO: 265 - protein, 154 aa, Homo sapiens [sequence omitted]

SEQ ID NO: 266 - protein, 1068 aa, Homo sapiens
MFTLSQTSRAWFIDRARQAREERLVQKERERAAVVIQAHVRSFLCRSRLQRDIRREIDDFFKADDPESTKRSALCIFKIARKLLFLFRIKEDNERFEKLCRSILSSMDAENEPKVWYVSLACSKDLTLLWIQQIKNILWYCCDFLKQLKPEILQDSRLITLYLTMLVTFTDTSTWKILRGKGESLRPAMNHICANIMGHLNQHGFYSVLQILLTRGLARPRPCLSKGTLTAAFSLALRPVIAAQFSDNLIRPFLIHIMSVPALVTHLSTVTPERLTVLESHDMLRKFIIFLRDQDRCRDVCESLEGCHTLCLMGNLLHLGSLSPRVLEEETDGFVSLLTQTLCYCRKYVSQKKSNLTHWHPVLGWFSQSVDYGLNESMHLITKQLQFLWGVPLIRIFFCDILSKKLLESQEPAHAQPASPQNVLPVKSLLKRAFQKSASVRNILRPVGGKRVDSAEVQKVCNICVLYQTSLTTLTQIRLQILTGLTYLDDLLPKLWAFICELGPHGGLKLFLECLNNDTEESKQLLAMLMLFCDCSRHLITILDDIEVYEEQISFKLEELVTISSFLNSFVFKMIWDGIVENAKGETLELFQSVHGWLMVLYERDCRRRFTPEDHWLRKDLKPSVLFQELDRDRKRAQLILQYIPHVIPHKNRVLLFRTMVTKEKEKLGLVETSSASPHVTHITIRRSRMLEDGYEQLRQLSQHAMKGVIRVKFVNDLGVDEAGIDQDGVFKEFLEEIIKRVFDPALNLFKTTSGDERLYPSPTSYIHENYLQLFEFVGKMLGKAVYEGIVVDVPFASFFLSQLLGHHHSVFYSSVDELPSLDSEFYKNLTSIKRYDGDITDLGLTLSYDEDVMGQLVCHELIPGGKTIPVTNENKISYIHLMAHFRMHTQIKNQTAALISGFRSIIKPEWIRMFSTPELQRLISGDNAEIDLEDLKKHTVYYGGFHGSHRVIIWLWDILASDFTPDERAMFLKFVTSCSRPPLLGFAYLKPPFSIRCVEVSDDQDTGDTLGSVLRGFFTIRKREPGGRLPTSSTCFNLLKLPNYSKKSVLREKLRYAISMNTGFELS

SEQ ID NO: 267 - protein, 3433 aa, Homo sapiens
MAKYGEHEASPDNGQNEFSDIIKSRSDEHNDVQKKTFTKWINARFSKSGKPPINDMFTDLKDGRKLLDLLEGLTGTSLPKERGSTRVHALNNVNRVLQVLHQNNVELVNIGGTDIVDGNHKLTLGLLWSIILHWQVKDVMKDVMSDLQQTNSEKILLSWVRQTTRPYSQVNVLNFTTSWTDGLAFNAVLHRHKPDLFSWDKVVKMSPIERLEHAFSKAQTYLGIEKLLDPEDVAVQLPDKKSIIMYLTSLFEVLPQQVTIDAIREVETLPRKYKKECEEEAINIQSTAPEEEHESPRAETPSTVTEVDMDLDSYQIALEEVLTWLLSAEDTFQEQDDISDDVEEVKDQFATHEAFMMELTAHQSSVGSVLQAGNQLITQGTLSDEEEFEIQEQMTLLNARWEALRVESMDRQSRLHDVLMELQKKQLQQLSAWLTLTEERIQKMETCPLDDDVKSLQKLLEEHKSLQSDLEAEQVKVNSLTHMVVIVDENSGESATAILEDQLQKLGERWTAVCRWTEERWNRLQEINILWQELLEEQCLLKAWLTEKEEALNKVQTSNFKDQKELSVSVRRLAILKEDMEMKRQTLDQLSEIGQDVGQLLDNSKASKKINSDSEELTQRWDSLVQRLEDSSNQVTQAVAKLGMSQIPQKDLLETVRVREQAITKKSKQELPPPPPPKKRQIHVDIEAKKKFDAISAELLNWILKWKTAIQTTEIKEYMKMQDTSEMKKKLKALEKEQRERIPRADELNQTGQILVEQMGKEGLPTEEIKNVLEKVSSEWKNVSQHLEDLERKIQLQEDINAYFKQLDELEKVIKTKEEWVKHTSISESSRQSLPSLKDSCQRELTNLLGLHPKIEMARASCSALMSQPSAPDFVQRGFDSFLGRYQAVQEAVEDRQQHLENELKGQPGHAYLETLKTLKDVLNDSENKAQVSLNVLNDLAKVEKALQEKKTLDEILENQKPALHKLAEETKALEKNVHPDVEKLYKQEFDDVQGKWNKLKVLVSKDLHLLEEIALTLRAFEADSTVIEKWMDGVKDFLMKQQAAQGDDAGLQRQLDQCSAFVNEIETIESSLKNMKEIETNLRSGPVAGIKTWVQTRLGDYQTQLEKLSKEIATQKSRLSESQEKAANLKKDLAEMQEWMTQAEEEYLERDFEYKSPEELESAVEEMKRAKEDVLQKEVRVKILKDNIKLLAAKVPSGGQELTSELNVVLENYQLLCNRIRGKCHTLEEVWSCWIELLHYLDLETTWLNTLEERMKSTEVLPEKTDAVNEALESLESVLRHPADNRTQIRELGQTLIDGGILDDIISEKLEAFNSRYEDLSHLAESKQISLEKQLQVLRETDQMLQVLQESLGELDKQLTTYLTDRIDAFQVPQEAQKIQAEISAHELTLEELRRNMRSQPLTSPESRTARGGSQMDVLQRKLREVSTKFQLFQKPANFEQRMLDCKRVLDGVKAELHVLDVKDVDPDVIQTHLDKCMKLYKTLSEVKLEVETVIKTGRHIVQKQQTDNPKGMDEQLTSLKVLYNDLGAQVTEGKQDLERASQLARKMKKEAASLSEWLSATETELVQKSTSEGLLGDLDTEISWAKNVLKDLEKRKADLNTITESSAALQNLIEGSEPILEERLCVLNAGWSRVRTWTEDWCNTLMNHQNQLEIFDGNVAHISTWLYQAEALLDEIEKKPTSKQEEIVKRLVSELDDANLQVENVRDQALILMNARGSSSRELVEPKLAELNRNFEKVSQHIKSAKLLIAQEPLYQCLVTTETFETGVPFSDLEKLENDIENMLKFVEKHLESSDEDEKMDEESAQIEEVLQRGEEMLHQPMEDNKKEKIRLQLLLLHTRYNKIKAIPIQQRKMGQLASGIRSSLLPTDYLVEINKILLCMDDVELSLNVPELNTAIYEDFSFQEDSLKNIKDQLDKLGEQIAVIHEKQPDVILEASGPEAIQIRDTLTQLNAKWDRINRMYSDRKGCFDRAMEEWRQFHCDLNDLTQWITEAEELLVDTCAPGGSLDLEKARIHQQELEVGISSHQPSFAALNRTGDGIVQKLSQADGSFLKEKLAGLNQRWDAIVAEVKDRQPRLKGESKQVMKYRHQLDEIICWLTKAEHAMQKRSTTELGENLQELRDLTQEMEVHAEKLKWLNRTELEMLSDKSLSLPERDKISESLRTVNMTWNKICREVPTTLKECIQEPSSVSQTRIAAHPNVQKVVLVSSASDIPVQSHRTSEISIPADLDKTITELADWLVLIDQMLKSNIVTVGDVEEINKTVSRMKITKADLEQRHPQLDYVFTLAQNLKNKASSSDMRTAITEKLERVKNQWDGTQHGVELRQQQLEDMIIDSLQWDDHREETEELMRKYEARLYILQQARRDPLTKQISDNQILLQELGPGDGIVMAFDNVLQKLLEEYGSDDTRNVKETTEYLKTSWINLKQSIADRQNALEAEWRTVQASRRDLENFLKWIQEAETTVNVLVDASHRENALQDSILARELKQQMQDIQAEIDAHNDIFKSIDGNRQKMVKALGNSEEATMLQHRLDDMNQRWNDLKAKSASIRAHLEASAEKWNRLLMSLEELIKWLNMKDEELKKQMPIGGDVPALQLQYDHCKALRRELKEKEYSVLNAVDQARVFLADQPIEAPEEPRRNLQSKTELTPEERAQKIAKAMRKQSSEVKEKWESLNAVTSNWQKQVDKALEKLRDLQGAMDDLDADMKEAESVRNGWKPVGDLLIDSLQDHIEKIMAFREEIAPINFKVKTVNDLSSQLSPLDLHPSLKMSRQLDDLNMRWKLLQVSVDDRLKQLQEAHRDFGPSSQHFLSTSVQLPWQRSISHNKVPYYINHQTQTTCWDHPKMTELFQSLADLNNVRFSAYRTAIKIRRLQKALCLDLLELSTTNEIFKQHKLNQNDQLLSVPDVINCLTTTYDGLEQMHKDLVNVPLCVDMCLNWLLNVYDTGRTGKIRVQSLKIGLMSLSKGLLEEKYRYLFKEVAGPTEMCDQRQLGLLLHDAIQIPRQLGEVAAFGGSNIEPSVRSCFQQNNNKPEISVKEFIDWMHLEPQSMVWLPVLHRVAAAETAKHQAKCNICKECPIVGFRYRSLKHFNYDVCQSCFFSGRTAKGHKLHYPMVEYCIPTTSGEDVRDFTKVLKNKFRSKKYFAKHPRLGYLPVQTVLEGDNLETPITLISMWPEHYDPSQSPQLFHDDTHSRIEQYATRLAQMERTNGSFLTDSSSTTGSVEDEHALIQQYCQTLGGESPVSQPQSPAQILKSVEREERGELERIIADLEEEQRNLQVEYEQLKDQHLRRGLPVGSPPESIISPHHTSEDSELIAEAKLLRQHKGRLEARMQILEDHNKQLESQLHRLRQLLEQPESDSRINGVSPWASPQHSALSYSLDPDASGPQFHQAAGEDLLAPPHDTSTDLTEVMEQIHSTFPSCCPNVPSRPQAM

SEQ ID NO: 268 - protein, 380 aa, Homo sapiens
MSETVICSSRATVMLYDDGNKRWLPAGTGPQAFSRVQIYHNPTANSFRVVGRKMQPDQQVVINCAIVRGVKYNQATPNFHQWRDARQVWGLNFGSKEDAAQFAAGMASALEALEGGGPPPPPALPTWSVPNGPSPEEVEQQKRQQPGPSEHIERRVSNAGGPPAPPAGGPPPPPGPPPPPGPPPPPGLPPSGVPAAAHGAGGGPPPAPPLPAAQGPGGGGAGAPGLAAAIAGAKLRKVSKQEEASGGPTAPKAESGRSGGGGLMEEMNAMLARRRKATQVGEKTPKDESANQEEPEARVPAQSESVRRPWEKNSTTLPRMKSSSSVTTSETQPCTPSSSDYSDLQRVKQELLEEVKKELQKVKEEIIEAFVQELRKRGSP

SEQ ID NO: 269 - protein, 357 aa, Homo sapiens
MSAFEKPQIIAHIQKGFNYTVFDCKWVPCSAKFVTMGNFARGTGVIQLYEIQHGDLKLLREIEKAKPIKCGTFGATSLQQRYLATGDFGGNLHIWNLEAPEMPVYSVKGHKEIINAIDGIGGLGIGEGAPEIVTGSRDGTVKVWDPRQKDDPVANMEPVQGENKRDCWTVAFGNAYNQEERVVCAGYDNGDIKLFDLRNMALRWETNIKNGVCSLEFDRKDISMNKLVATSLEGKFHVFDMRTQHPTKGFASVSEKAHKSTVWQVRHLPQNRELFLTAGGAGGLHLWKYEYPIQRSKKDSEGIEMGVAGSVSLLQNVTLSTQPISSLDWSPDKRGLCVCSSFDQTVRVLIVTKLNKI

SEQ ID NO: 270 - protein, 121 aa, Homo sapiens
MGRIFLDHIGGTRLFSCANCDTILTNRSELISTRFTGATGRAFLFNKVVNLQYSEVQDRVMLTGRHMVRDVSCKNCNSKLGWIYEFATEDSQRYKEGRVILERALVRESEGFEEHVPSDNS

SEQ ID NO: 271 - protein, 450 aa, Homo sapiens
MPSPLGPPCLPVMDPETTLEEPETARLRFRGFCYQEVAGPREALARLRELCCQWLQPEAHSKEQMLEMLVLEQFLGTLPPEIQAWVRGQRPGSPEEAAALVEGLQHDPGQLLGWITAHVLKQEVLPAAQKTEEPLGSPHPSGTVESPGEGPQDTRIEGSVQLSCSVKEEPNVDGQEVAPSSPPLAAQSPEGNHGHQEPASTSFHPPRIQEEWGLLDRSQKELYWDAMLEKYGTVVSLGLPPHQPEAQAQSELGMLLTGTGVCRSLRSGNESEGPPGCPEAQPPQGPGPAAWEGLSGAATPAPTVRPGTPPVPTQPTPAETRLEPAATPRKPYTCEQCGRGFDWKSVFVIHHRTHTSGPGVQSPGLATGESTEKPPQGEVAFPHHPRRSLTGPRSYPCEECGCSFSWKSQLVIHRKSHTGQRRHFCSDCGRAFDWKSQLVIHRKGHRPEVP

SEQ ID NO: 272 - protein, 522 aa, Homo sapiens
MAVSHLPTMVQESVTFKDVAILFTQEEWGQLSPAQRALYRDVMLENYSNLVSLGLLGPKPDTFSQLEKREVWMPEDTPGGFCLDWMTMPASKKSTVKAEIPEEELDQWTIKERFSSSSHWKCASLLEWQCGGQEISLQRVVLTHPNTPSQECDESGSTMSSSLHSDQSQGFQPSKNAFECSECGKVFSKSSTLNKHQKIHNEKNANQKIHIKEKRYECRECGKAFHQSTHLIHHQRIHTGEKPYECKECGKAFSVSSSLTYHQKIHTGEKPFECNLCGKAFIRNIHLAHHHRIHTGEKPFKCNICEKAFVCRAHLTKHQNIHSGEKPYKCNECGKAFNQSTSFLQHQRIHTGEKPFECNECGKAFRVNSSLTEHQRIHTGEKPYKCNECGKAFRDNSSFARHRKIHTGEKPYRCGLCEKAFRDQSALAQHQRIHTGEKPYTCNICEKAFSDHSALTQHKRIHTREKPYKCKICEKAFIRSTHLTQHQRIHTGEKPYKCNKCGKAFNQTANLIQHQRHHIGEK

SEQ ID NO: 273 - protein, 541 aa, Homo sapiens
MPRRKQSHPQPVKCEGVKVDTEDSLDEGPGALVLESDLLLGQDLEFEEEEEEEEGDGNSDQLMGFERDSEGDSLGARPGLPYGLSDDESGGGRALSAESEVEEPARGPGEARGERPGPACQLCGGPTGEGPCCGAGGPGGGPLLPPRLLYSCRLCTFVSHYSSHLKRHMQTHSGEKPFRCGRCPYASAQLVNLTRHTRTHTGEKPYRCPHCPFACSSLGNLRRHQRTHAGPPTPPCPTCGFRCCTPRPARPPSPTEQEGAVPRRPEDALLLPDLSLHVPPGGASFLPDCGQLRGEGEGLCGTGSEPLPELLFPWTCRGCGQELEEGEGSRLGAAMCGRCMRGEAGGGASGGPQGPSDKGFACSLCPFATHYPNHLARHMKTHSGEKPFRCARCPYASAHLDNLKRHQRVHTGEKPYKCPLCPYACGNLANLKRHGRIHSGDKPFRCSLCNYSCNQSMNLKRHMLRHTGEKPFRCATCAYTTGHWDNYKRHQKVHGHGGAGGPGLSASEGWAPPHSPPSVLSSRGPPALGTAGSRAVHTDSS

SEQ ID NO: 274 - protein, 633 aa, Homo sapiens
MLRRGYKASERRRHLSERLSWHQDQALSSSIYLLREMGPTGFLLREEEPEYMDFRVFLGNPHVCNCSTFPKGGELCKHICWVLLKKFKLPRNHESALQLGLGEREISDLLRGIHRVQTPQPGTNDENEHVEEDGYIKQKEIDSEDICSICQELLLEKKLPVTFCRFGCGNSIHIKCMKILANYQSTSNTSMLKCPLCRKEFAPLKLILEEFKNSSKLVAAAEKERLDKHLGIPCNNCKQFPIEGKCYKCTECIEYHLCQECFDSCCHLSHTFTFREKRNQKWRSLEKRADEVVKYIDTKNEIEEKMSHFQEKQGQVYTPKHIVRSLPLQLITKNSKLLAPGYQCLLCLKAFHLGQHTRLLPCTHKFHRKCIDNWLFHKCNSCPIDGQVIYNPLTWKNSAVNGQAHQSVSNRDIIHLSKQKEPDLFIPGTGLVLKQNRLGILPSIPQCNFDELNTPQSPKDAYENTTIDNLCSIKLDNSNSKKLTYDYKISQHFPRYLQDLPTVSFGKIPSQTLLPPIVHKNIVCPTAMESPCISGKFHTSLSRMTKGCKCNNHNLKKTPATKIREDNKRSTLLPEDFNLIVNWSTAKLSLSKRYSNCMGEITRKCSHLSRQPVSHSVNTKSTELSLIIEGVQL
